(19) United States
(12) Patent Application Publication
(10) Pub. No.: US 2025/0207138 A1
(43) Pub. Date: Jun. 26, 2025

(54) RNAI CONSTRUCTS FOR INHIBITING PNPLA3 EXPRESSION AND METHODS OF USE THEREOF

(71) Applicant: AMGEN INC., Thousand Oaks, CA (US)

(72) Inventors: Bryan MEADE, Westlake Village, CA (US); Justin K. MURRAY, Moorpark, CA (US); Ingrid RULIFSON, Palo Alto, CA (US); Oliver HOMANN, Berkeley, CA (US)

(73) Assignee: AMGEN INC., Thousand Oaks, CA (US)

(21) Appl. No.: 18/848,796

(22) PCT Filed: Mar. 21, 2023
(86) PCT No.: PCT/US2023/064765

§ 371 Date: Sep. 19, 2024

Related U.S. Application Data
(60) Provisional application No. 63/322,845, filed on Mar. 23, 2022.

(51) Int. Cl. C12N 15/113

(52) U.S. Cl. CPC C12N 15/1137; C12Y 301/01004; C12N 2310/14; C12N 2310/315; C12N 2310/321; C12N 2310/322

(57) ABSTRACT

The disclosure relates to RNAi constructs, such as siRNA, for reducing expression of the PNPLA3 gene. Methods of using such RNAi constructs to treat or prevent liver disease, such as nonalcoholic fatty liver disease (NAFLD), are also described.

### CROSS-REFERENCE TO RELATED APPLICATIONS

[0001] This application claims the benefit of U.S. Provisional Application No. 63/322,845, filed on Mar. 23, 2022.

### FIELD OF THE INVENTION

[0002] The present disclosure relates to compositions and methods for modulating liver expression of patatin-like phospholipase domain-containing 3 (PNPLA3). In particular, the present disclosure relates to nucleic acid-based therapeutics for reducing PNPLA3 expression via RNA interference and methods of using such nucleic acid-based therapeutics to treat or prevent liver disease, such as nonalcoholic fatty liver disease (NAFLD).

### INCORPORATION-BY-REFERENCE OF MATERIAL SUBMITTED ELECTRONICALLY

[0003] Incorporated by reference in its entirety herein is a nucleotide/amino acid sequence listing submitted concurrently herewith and identified as follows: One 1,930 kilobyte XML document named “A-2910-WO01-SEC.xml,” created on Mar. 20, 2023.

### BACKGROUND

[0004] Comprising a spectrum of hepatic pathologies, nonalcoholic fatty liver disease (NAFLD) is the most common chronic liver disease in the world, the prevalence of which doubled in the last 20 years and now is estimated to affect approximately 20% of the world's population (Sattar et al. (2014) BMJ 349: g4596; Loomba and Sanyal (2013) Nature Reviews Gastroenterology & hepatology 10(11):686-690; Kim and Kim (2017) Clin Gastroenterol Hepatol 15(4):474-485; Petta et al. (2016) Dig Liver Dis 48(3):333-342). NAFLD begins with the accumulation of triglyceride in the liver and is defined by the presence of cytoplasmic lipid droplets in more than 5% of hepatocytes in an individual 1) without a history of significant alcohol consumption and 2) in which the diagnosis of other types of liver disease have been excluded (Zhu et al (2016) World J Gastroenterol 22(36):8226-33; Rinella (2015) JAMA 313(22):2263-73; Yki-Jarvinen (2016) Diabetologia 59(6):1104-11). In some individuals the accumulation of ectopic fat in the liver, called steatosis, triggers inflammation and hepatocellular injury leading to a more advanced stage of disease called nonalcoholic steatohepatitis (NASH) (Rinella, supra). As of 2015, 75-100 million Americans are predicted to have NAFLD, with NASH accounting for approximately 10-30% of NAFLD diagnoses (Rinella, supra; Younossi et al (2016) Hepatology 64(5):1577-1586).

[0005] Patatin-like phospholipase domain-containing 3 (PNPLA3), formerly known as adiponutrin (ADPN) and calcium-independent phospholipase A2-epsilon (iPLA(2)ε), is a type II transmembrane protein (Wilson et al (2006) J Lipid Res 47(9):1940-9; Jenkins et al (2004) J Biol Chem 279(47):48968-75). Initially identified in adipose cells as a membrane-associated, adipose-enriched protein induced during adipogenesis in mice, it is now well characterized to be expressed in other tissues, including the liver (Wilson et al, supra; Baulande et al. (2001) J Biol Chem 276(36):33336-44; Moldes et al. (2006) Eur J Endocrinol 155(3):461-8; Faraj et al. (2006) J Endocrinol 191(2):427-35; Liu et al. (2004) J Clin Endocrinol Metab 89(6):2684-9; Lake et al. (2005) J Lipid Res 46(11):2477-87). In cell-free biochemical systems, recombinant PNPLA3 protein can exhibit either triacylglycerol lipase or transacylation activity (Jenkins et al., supra; Kumari et al. (2012) Cell Metab 15(5):691-702; He et al. (2010) J Biol Chem 285(9):6706-15). In hepatocytes, PNPLA3 is expressed on the endoplasmic reticulum and lipid membranes and predominantly exhibits triacylglycerol hydrolase activity (He et al., supra; Huang et al. (2010) Proc Natl Acad Sci USA 107(17):7892-7; Ruhanen et al. (2014) J Lipid Res 55(4):739-46; Pingitore et al. (2014) Biochim Biophys Acta 1841(4):574-80). Although PNPLA3 lacks a secretory signal, data indicates that it is secreted and can be found in human plasma as disulfide-bond dependent multimers (Winberg et al. (2014) Biochem Biophys Res Commun 446(4):1114-9).

[0006] Currently, NAFLD symptoms are managed via weight loss and treatment of any secondary conditions, as no pharmacologic treatments have been approved. Thus, there is a need for compositions and methods that treat NAFLD in affected individuals.

### SUMMARY OF THE INVENTION

[0007] The present disclosure provides an RNAi construct comprising a sense strand and an antisense strand, wherein the antisense strand comprises a region having a sequence that is complementary to a PNPLA3 mRNA sequence, such as a PNPLA3 mRNA sequence set forth in Table 1, and wherein the RNAi construct inhibits the expression of PNPLA3. In certain embodiments, the RNAi construct comprises a region having at least 15 contiguous nucleotides differing by no more than 3 nucleotides from an antisense sequence selected from SEQ ID NOs: 565-1068 and SEQ ID NOs: 2329-3588. In some embodiments, the antisense strand hybridizes to a PNPLA3 mRNA sequence listed in Table 1.

[0008] In some embodiments, the sense strand of the RNAi constructs described herein comprises a sequence that is sufficiently complementary to the sequence of the antisense strand to form a duplex region of about 15 to about 30 base pairs in length. In these and other embodiments, the sense and antisense strands each are about 15 to about 30 nucleotides in length. In some embodiments, the RNAi constructs comprise at least one blunt end. In other embodiments, the RNAi constructs comprise at least one nucleotide overhang. Such nucleotide overhangs may comprise at least 1 to 6 unpaired nucleotides and can be located at the 3′ end of the sense strand, the 3′ end of the antisense strand, or the 3′ end of both the sense and antisense strand. In certain embodiments, the RNAi constructs comprise an overhang of two unpaired nucleotides at the 3′ end of the sense strand and the 3′ end of the antisense strand. In other embodiments, the RNAi constructs comprise an overhang of two unpaired nucleotides at the 3′ end of the antisense strand and a blunt end of the 3′ end of the sense strand/5′ end of the antisense strand.

[0009] The RNAi constructs of the disclosure may comprise one or more modified nucleotides, including nucleotides having modifications to the ribose ring, nucleobase, or phosphodiester backbone. In some embodiments, the RNAi constructs comprise one or more 2′-modified nucleotides. Such 2′-modified nucleotides can include 2′-fluoro modified nucleotides, 2′-O-methyl modified nucleotides, 2′-O-methoxyethyl modified nucleotides, 2′-O-allyl modified nucleotides, bicyclic nucleic acids (BNA), glycol nucleic acids (GNAs), inverted bases (e.g. inverted adenosine) or combinations thereof. In one particular embodiment, the RNAi constructs comprise one or more 2′-fluoro modified nucleotides, 2′-O-methyl modified nucleotides, or combinations thereof. In some embodiments, all of the nucleotides in the sense and antisense strand of the RNAi construct are modified nucleotides.

[0010] In some embodiments, the RNAi constructs comprise at least one backbone modification, such as a modified internucleotide or internucleoside linkage. In certain embodiments, the RNAi constructs described herein comprise at least one phosphorothioate internucleotide linkage. In particular embodiments, the phosphorothioate internucleotide linkages may be positioned at the 3′ or 5′ ends of the sense and/or antisense strands.

[0011] In some embodiments, the antisense strand and/or the sense strand of the RNAi constructs of the disclosure may comprise or consist of a sequence from the antisense and sense sequences listed in FIG. 1 or 2. In certain embodiments, the RNAi construct may comprise a duplex compound comprising an antisense strand and a sense strand, wherein the antisense strand comprises a sequence selected from SEQ ID NOs: 565-1068 and SEQ ID NOs: 2329-3588 and the sense strand comprises a sequence selected from SEQ ID NOs: 61-564 and SEQ ID NOs: 1069-2328.

[0012] The disclosure also provides a composition comprising the aforementioned RNAi construct and a pharmaceutically acceptable carrier, excipient, or diluent, as well as methods of reducing the expression of PNPLA3 in a patient in need thereof comprising administering to the patient the aforementioned RNAi construct or composition.

### BRIEF DESCRIPTION OF THE DRAWINGS

[0013] FIG. 1 is a table listing unmodified and modified siRNA sequences directed to PNPLA3 tested in the in vitro experiments described in Example 2. All sequences are shown in 5′-3′ orientation.

[0014] FIG. 2 is a table listing unmodified and modified siRNA sequences directed to PNPLA3 tested in the in vivo studies described in Example 3. All sequences are shown in 5′-3′ orientation.

[0015] FIG. 3 is a table showing results of siRNA inhibition of PNPLA3 in an AAV-based mouse model containing the full human PNPLA3 coding sequence (CDS).

[0016] FIG. 4 is a table showing results of siRNA inhibition of PNPLA3 in an AAV-based mouse model containing portions of the 3′ untranslated region (UTR) of human PNPLA3.

[0017] FIG. 5 is a table showing results of siRNA inhibition of PNPLA3 in a homozygous hPNPLA3^{I148M} knock-in (hPNPLA3^{I148M} KI) mouse model.

[0018] The nucleotide sequences in FIGS. 1-5 and other parts of the application are listed according to the following notations: A, U, G, and C=corresponding ribonucleotide; dT=deoxythymidine; dA=deoxyadenosine; dC=deoxycytidine; dG=deoxyguanosine; invAb=inverted A basic; invDT=inverted deoxythymidine; invDA=inverted deoxyadenosine; invDC=inverted deoxycytidine; invDG=inverted deoxyguanosin; a, u, g, and c=corresponding 2′-O-methyl ribonucleotide; Af, Uf, Gf, and Cf=corresponding 2′-deoxy-2′-fluoro (“2′-fluoro”) ribonucleotide; Ab=Abasic; MeO-I=2′ methoxy inosine; GNA=glycol nucleic acid; sGNA=glycol nucleic acid with 3′ phosphorothioate; LNA=locked nucleic acid. Insertion of an “s” in the sequence indicates that the two adjacent nucleotides are connected by a phosphorothiodiester group (e.g. a phosphorothioate internucleotide linkage). Unless indicated otherwise, all other nucleotides are connected by 3′-5′ phosphodiester groups.

### DETAILED DESCRIPTION

[0019] The present disclosure is based, in part, on the design and generation of RNAi constructs that target the PNPLA3 gene and reduce expression of PNPLA3 in liver cells in a non-sequence specific manner. The non-sequence specific inhibition of PNPLA3 expression is useful for treating or preventing conditions associated with PNPLA3 expression, including liver-related diseases, such as, for example, simple fatty liver (steatosis), nonalcoholic steatohepatitis (NASH), cirrhosis (irreversible, advanced scarring of the liver), or PNPLA3-related obesity.

[0020] The disclosure provides compositions and methods for regulating the expression of the Patatin-Like Phospholipase Domain Containing 3 (PNPLA3) gene. In some embodiments, the gene may be within a cell or subject, such as a mammal (e.g., a human). In some embodiments, compositions of the disclosure comprise RNAi constructs that target a PNPLA3 mRNA and reduce PNPLA3 expression in a cell or mammal. Such RNAi constructs are useful for treating or preventing various forms of liver-related diseases, such as, for example, simple fatty liver (steatosis), nonalcoholic fatty liver disease (NAFLD), nonalcoholic steatohepatitis (NASH), cirrhosis (irreversible, advanced scarring of the liver), or PNPLA3-related obesity.

[0021] In 2008, a genome wide association study (GWAS) exploring nonsynonymous sequence variations, or single nucleotide polymorphisms (SNPs), associated with NAFLD identified a variant in PNPLA3, (rs738409[G], encoding I148M; which can be referred to as PNPLA3-rs738409, PNPLA3-ma, or PNPLA3-minor allele), as significantly associated with hepatic fat content. Since this initial report, subsequent GWAS confirmed PNPLA3 rs738409 as the major genetic determinant of NAFLD, significantly associated with 1) increased levels of the serum biomarker for liver damage, alanine transaminase (ALT), 2) NAFLD incidence, progression, and severity, 3) both obese and lean individuals, and 4) the only known SNP shown to be significantly associated with all stages of NAFLD: steatosis, NASH, cirrhosis and hepatic cell carcinoma. The consensus among numerous GWAS indicates that the association of PNPLA3 rs738409 with NAFLD is independent of age, gender, ethnicity, metabolic syndrome, body mass index, insulin resistance, and serum lipids. Furthermore, statistical analyses from multiple sources estimate approximately 50% of NAFLD patients carry the PNPLA3 rs738409 mutation. Patients can be homozygous or heterozygous for the PNPLA3 rs738409 mutation. Additionally, it has been discovered that patients having the PNPLA3 rs738409 mutation often also carry an rs738408 mutation 3 base pairs away (Tian et al (2010) Nature Genetics 42:21-23). Thus, a patient can have a PNPLA3-rs738409 minor allele, a PNPLA3-rs738408 minor allele or a PNPLA3-rs738409-rs738408 double minor allele mutation (PNPLA3-dma).

[0022] Investigators have developed mouse models for exploring PNPLA3 function in vivo. To date, no detectable metabolic phenotype has been identified as the result of PNPLA3-deficiency or PNPLA3 over-expression. In contrast, expression of PNPLA3I148M in both transgenic mice and knock-in mice led to increased hepatic triglyceride levels akin to NAFLD. Thus, the combined in vivo mouse model data points to expression of the mutant PNPLA3I148M protein, and not over-expression of the wild-type protein, as the driver of the disease phenotype. These findings, in addition to the high frequency of the minor allele in NAFLD-affected individuals and prevailing association with the disease, underline PNPLA3 rs738409 as a prime therapeutic target for NAFLD.

[0023] RNA interference (RNAi) is the process of introducing exogeneous RNA into a cell leading to specific degradation of the mRNA encoding the targeted protein with a resultant decrease in protein expression. Advances in both the RNAi technology and hepatic delivery, as well as growing positive outcomes with other RNAi-based therapies, suggest RNAi as a compelling means to therapeutically treat NAFLD by directly targeting PNPLA3.

[0024] As used herein, the term “RNAi construct” refers to an agent comprising an RNA molecule that is capable of downregulating expression of a target gene (e.g. PNPLA3) via an RNA interference mechanism when introduced into a cell. “RNA interference” is the process by which a nucleic acid molecule induces the cleavage and degradation of a target RNA molecule (e.g. messenger RNA or mRNA molecule) in a sequence-specific manner, e.g., through an RNA induced silencing complex (RISC) pathway. In some embodiments, the RNAi construct comprises a double-stranded RNA (dsRNA) molecule comprising two antiparallel strands of contiguous nucleotides that are sufficiently complementary to each other to hybridize to form a duplex region. A double-stranded RNAi construct also may be referred to as an RNAi “trigger.” The terms “hybridize” or “hybridization” refer to the pairing of complementary polynucleotides, typically via hydrogen bonding (e.g., Watson-Crick, Hoogsteen or reversed Hoogsteen hydrogen bonding) between complementary bases in the two polynucleotides. The strand comprising a region having a sequence that is substantially complementary to a target sequence (e.g., target mRNA) is referred to as the “antisense strand.” The “sense strand” refers to the strand that includes a region that is substantially complementary to a region of the antisense strand. In some embodiments, the sense strand may comprise a region that has a sequence that is substantially identical to the target sequence.

[0025] In certain embodiments, the sense strand and antisense strand of the double-stranded RNA may be two separate molecules that hybridize to form a duplex region but are otherwise unconnected. Such double-stranded RNA molecules formed from two separate strands are referred to as “small interfering RNAs” or “short interfering RNAs” (siRNAs). siRNAs are a class of non-coding, double-stranded RNA molecules that are typically about 20-27 base pairs and are central to RNAi. Thus, in some embodiments, the RNAi constructs of the disclosure comprise an siRNA. In other embodiments, the RNAi construct may be a microRNA (also known as “miRNA” or “mature miRNA”). miRNAs are small (approximately 18-24 nucleotides in length), non-coding RNA molecules present in plants, animals, and some viruses. miRNAs resemble siRNA, but miRNAs originate from hairpin mRNA structures. miRNAs regulate gene expression by base-pairing to complementary regions of target mRNAs.

[0026] In some embodiments, the disclosure provides an RNAi construct directed to PNPLA3. In some embodiments, the RNAi construct is an siRNA that comprises a sense strand and an antisense strand, wherein the antisense strand comprises a region that is complementary to PNPLA3 mRNA sequence. The region of the RNAi antisense strand may be complementary to any suitable region of a PNPLA3 mRNA sequence. For example, the antisense strand may comprise a region that is complementary to the coding region or the 3′ untranslated region (UTR) of a PNPLA3 mRNA sequence. Exemplary PNPLA3 target sequences within the coding region (reference sequence GenBank Accession No. NM_025225.2) and 3′ UTR are set forth in Table 1. The antisense strand of the RNAi construct desirably hybridizes to a PNPLA3 mRNA sequence listed in Table 1.

TABLE 1
PNPLA3 siRNA Target Sites

| | | PNPLA3 Location | |
|---|---|---|---|
| PNPLA3 | | (reference sequence | SEQ ID |
| Target Region | 23 mer Target Site | NM_025225.2) | NO: |
| Coding Region | CTGCAGGTCCTCTCAGATCTTGT | 391 | 1 |
| Coding Region | GAGAGATATGCCTTCGAGGATAT | 899 | 2 |
| Coding Region | CGCGGCTGGAGCTTGTCCTTCGC | 211 | 3 |
| Coding Region | AGATATGCCTTCGAGGATATTTG | 902 | 4 |
| Coding Region | TGCAGGTCCTCTCAGATCTTGTG | 392 | 5 |
| Coding Region | GGTCCAAAGACGAAGTCGTGGAT | 593 | 6 |
| Coding Region | CCTTCTACAGTGGCCTTATCCCT | 641 | 7 |
| Coding Region | TTTGCAACTTGCTACCCATTAGG | 1220 | 8 |
| Coding Region | GTGACAACGTACCCTTCATTGAT | 704 | 9 |
| Coding Region | CGACGCGCGCATGTTGTTCGGCG | 309 | 10 |
| Coding Region | AGATTTGCAACTTGCTACCCATT | 1217 | 11 |
| Coding Region | GGGAGAGATATGCCTTCGAGGAT | 897 | 12 |
| Coding Region | CTCCTTCCTTCAGAGGCGTGCGA | 662 | 13 |
| Coding Region | TGACAACGTACCCTTCATTGATG | 705 | 14 |
| Coding Region | GACAACGTACCCTTCATTGATGC | 706 | 15 |
| Coding Region | TACGACATCTGCCCTAAAGTCAA | 766 | 16 |
| Coding Region | ACTTGCTACCCATTAGGATAATG | 1226 | 17 |
| Coding Region | CTATGGGGAGTACGACATCTGCC | 756 | 18 |
| Coding Region | TGGAATCTGCCATTGCGATTGTC | 1280 | 19 |
| Coding Region | ACGACATCTGCCCTAAAGTCAAG | 767 | 20 |
| Coding Region | TATGCCTTCGAGGATATTTGGAT | 905 | 21 |
| Coding Region | TGAGCTGCTAGACCACCTGCGTC | 1092 | 22 |
| Coding Region | GCAACTTGCTACCCATTAGGATA | 1223 | 23 |
| Coding Region | CAACTTGCTACCCATTAGGATAA | 1224 | 24 |
| Coding Region | TGCACTGCGTCGGCGTCCTCTCC | 347 | 25 |
| Coding Region | AGCTTGTCCTTCGCGGGCTGCGG | 220 | 26 |
| Coding Region | TTCCAGATATGCCCGACGATGTC | 1322 | 27 |
| Coding Region | GATGGGGAAAACGTTCTGGTGTC | 562 | 28 |
| Coding Region | ATGGGGAAAACGTTCTGGTGTCT | 563 | 29 |
| Coding Region | CCCCGGATCTCAAGGTGCTGGGA | 878 | 30 |
| Coding Region | TCAGAGGCGTGCGATATGTGGAT | 671 | 31 |
| Coding Region | CGCCTCTGCACAGGGAACCTCTA | 832 | 32 |
| Coding Region | CGACATCTGCCCTAAAGTCAAGT | 768 | 33 |
| Coding Region | GGTGGATACATGAGCAAGATTTG | 1201 | 34 |
| Coding Region | AGCAAGATTTGCAACTTGCTACC | 1213 | 35 |
| Coding Region | TGCTGGGAGAGATATGCCTTCGA | 893 | 36 |
| Coding Region | GTCCAGAGACTGGTGACATGGCT | 1300 | 37 |
| Coding Region | GAAAACGTTCTGGTGTCTGACTT | 568 | 38 |
| Coding Region | TTCGGTCCAAAGACGAAGTCGTG | 590 | 39 |
| Coding Region | ATTTGCAACTTGCTACCCATTAG | 1219 | 40 |
| Coding Region | GAGTGAGTGACAACGTACCCTTC | 698 | 41 |
| Coding Region | GCTGGGAGAGATATGCCTTCGAG | 894 | 42 |
| Coding Region | CTGGGAGAGATATGCCTTCGAGG | 895 | 43 |
| Coding Region | ATGAAAGACAAAGGTGGATACAT | 1189 | 44 |
| Coding Region | TGAGTGACAACGTACCCTTCATT | 701 | 45 |
| Coding Region | CTCCACCTTTCCCAGTTTTTCAC | 1602 | 46 |
| Coding Region | TCCACCTTTCCCAGTTTTTCACT | 1603 | 47 |
| Coding Region | AGTACGACATCTGCCCTAAAGTC | 764 | 48 |
| 3′UTR | AGAACACCTTTTTCACCTAACTA | 2197 | 49 |
| 3′UTR | CCTCTGAGCTGAGTTGGTTTTAT | 1760 | 50 |
| 3′UTR | CTGAGCTGAGTTGGTTTTATGAA | 1763 | 51 |
| 3′UTR | TGAGCTGAGTTGGTTTTATGAAA | 1764 | 52 |
| 3′UTR | AGTTGGTTTTATGAAAAGCTAGG | 1771 | 53 |
| 3′UTR | TGCAGAGGGTCCCTTACTGACTG | 1890 | 54 |
| 3′UTR | GAACACCTTTTTCACCTAACTAA | 2198 | 55 |
| 3′UTR | AACACCTTTTTCACCTAACTAAA | 2199 | 56 |
| 3′UTR | ACACCTTTTTCACCTAACTAAAA | 2200 | 57 |
| 3′UTR | CACCTTTTTCACCTAACTAAAAT | 2201 | 58 |
| 3′UTR | ACCTTTTTCACCTAACTAAAATA | 2202 | 59 |
| 3′UTR | CTTTTTCACCTAACTAAAATAAT | 2204 | 60 |

[0027] The disclosed RNAi construct is not required to hybridize to a particular PNPLA3 SNP. In such aspects, the RNAi construct may bind to the 3′ UTR of PNPLA3. As discussed above, non-sequence specific PNPLA3 RNAi may have broader therapeutic applications for diseases associated with PNPLA3 expression, including for example, simple fatty liver (steatosis), nonalcoholic steatohepatitis (NASH), cirrhosis (irreversible, advanced scarring of the liver), or PNPLA3-related obesity. In some embodiments, the RNAi construct is an siRNA molecule that contains any of the sequences set forth in FIG. 1 or 2 (e.g., an antisense strand comprising a sequence selected from SEQ ID NOs: 565-1068 and SEQ ID NOs: 2329-3588 and/or a sense strand comprising a sequence selected from SEQ ID NOs: 61-564 and SEQ ID NOs: 1069-2328).

[0028] A double-stranded RNAi molecule may include chemical modifications to ribonucleotides, including modifications to the ribose sugar, base, or backbone components of the ribonucleotides, such as those described herein or known in the art. Any such modifications, as used in a double-stranded RNA molecule (e.g. siRNA, shRNA, or the like), are encompassed by the term “double-stranded RNA” for the purposes of this disclosure.

[0029] As used herein, a first sequence is “complementary” to a second sequence if a polynucleotide comprising the first sequence can hybridize to a polynucleotide comprising the second sequence to form a duplex region under certain conditions, such as physiological conditions. Other such conditions can include moderate or stringent hybridization conditions, which are known to those of skill in the art. A first sequence is considered to be fully complementary (100% complementary) to a second sequence if a polynucleotide comprising the first sequence base pairs with a polynucleotide comprising the second sequence over the entire length of one or both nucleotide sequences without any mismatches. A sequence is “substantially complementary” to a target sequence if the sequence is at least about 80%, 85%, 90%, 95%, 96%, 97%, 98%, 99% or 100% complementary to a target sequence. Percent complementarity can be calculated by dividing the number of bases in a first sequence that are complementary to bases at corresponding positions in a second or target sequence by the total length of the first sequence. A sequence may also be said to be substantially complementary to another sequence if there are no more than 5, 4, 3, 2, or 1 mismatch over a 30 base pair duplex region when the two sequences are hybridized. Generally, if any nucleotide overhangs, as defined herein, are present, the sequence of such overhangs is not considered in determining the degree of complementarity between two sequences. By way of example, a sense strand of 21 nucleotides in length and an antisense strand of 21 nucleotides in length that hybridize to form a 19 base pair duplex region with a 2-nucleotide overhang at the 3′ end of each strand would be considered to be fully complementary as the term is used herein.

[0030] In some embodiments, a region of the antisense strand comprises a sequence that is fully complementary to a region of the target RNA sequence (e.g. PNPLA3 mRNA). In such embodiments, the sense strand may comprise a sequence that is fully complementary to the sequence of the antisense strand. In other such embodiments, the sense strand may comprise a sequence that is substantially complementary to the sequence of the antisense strand, e.g., having 1, 2, 3, 4, or 5 mismatches in the duplex region formed by the sense and antisense strands. In certain embodiments, it is preferred that any mismatches occur within the terminal regions (e.g. within 6, 5, 4, 3, 2, or 1 nucleotides of the 5′ and/or 3′ ends of the strands). In one embodiment, any mismatches in the duplex region formed from the sense and antisense strands desirably occur within 6, 5, 4, 3, 2, or 1 nucleotides of the 5′ end of the antisense strand.

[0031] Where the two substantially complementary strands of a dsRNA are comprised of separate RNA molecules, those molecules need not, but can be, covalently connected. Where the two strands are connected covalently by means other than an uninterrupted chain of nucleotides between the 3′-end of one strand and the 5′-end of the respective other strand forming the duplex structure, the connecting structure is referred to as a “linker.” The RNA strands may have the same or a different number of nucleotides. The maximum number of base pairs in the duplex is the number of nucleotides in the shortest strand of the dsRNA minus any overhangs that are present in the duplex. In addition to the duplex structure, an RNAi may comprise one or more nucleotide overhangs.

[0032] In other embodiments, the sense strand and the antisense strand that hybridize to form a duplex region may be part of a single RNA molecule, i.e., the sense and antisense strands are part of a self-complementary region of a single RNA molecule. In such cases, a single RNA molecule comprises a duplex region (also referred to as a stem region) and a loop region. The 3′ end of the sense strand is connected to the 5′ end of the antisense strand by a contiguous sequence of unpaired nucleotides, which will form the loop region. The loop region is typically of a sufficient length to allow the RNA molecule to fold back on itself such that the antisense strand can base pair with the sense strand to form the duplex or stem region. The loop region can comprise from about 3 to about 25, from about 5 to about 15, or from about 8 to about 12 unpaired nucleotides. As noted herein, such RNA molecules with at least partially self-complementary regions are referred to as “short hairpin RNAs” (shRNAs). In some embodiments, the loop region can comprise at least 1, 2, 3, 4, 5, 10, 20, or 25 unpaired nucleotides. In other embodiments, the loop region can have 10, 9, 8, 7, 6, 5, 4, 3, 2, or fewer unpaired nucleotides. In certain embodiments, the RNAi constructs of the disclosure comprise an shRNA. The length of a single, at least partially self-complementary RNA molecule can be from about 35 nucleotides to about 100 nucleotides, from about 45 nucleotides to about 85 nucleotides, or from about 50 to about 60 nucleotides and comprise a duplex region and loop region each having the lengths recited herein.

[0033] In some embodiments, the RNAi constructs of the disclosure comprise a sense strand and an antisense strand, wherein the antisense strand comprises a region having a sequence that is substantially or fully complementary to a PNPLA3 messenger RNA (mRNA) sequence. As used herein, a “PNPLA3 mRNA sequence” refers to any messenger RNA sequence, including splice variants, encoding a PNPLA3 protein, including PNPLA3 protein variants or isoforms from any species (e.g. mouse, rat, non-human primate, human). PNPLA3 protein is also known as adiponutrin (ADPN) and calcium-independent phospholipase A2-epsilon (iPLA(2)ε)).

[0034] A PNPLA3 mRNA sequence also includes the transcript sequence expressed as its complementary DNA (cDNA) sequence. A cDNA sequence refers to the sequence of an mRNA transcript expressed as DNA bases (e.g. guanine, adenine, thymine, and cytosine) rather than RNA bases (e.g. guanine, adenine, uracil, and cytosine). Thus, the antisense strand of the RNAi constructs of the disclosure may comprise a region having a sequence that is substantially or fully complementary to a target PNPLA3 mRNA sequence or PNPLA3 cDNA sequence. A PNPLA3 mRNA or cDNA sequence can include, but is not limited to, any PNPLA3 mRNA or cDNA sequence such as can be derived from the NCBI Reference sequence NM_025225.2.

[0035] A region of the antisense strand can be substantially complementary or fully complementary to at least 15 consecutive nucleotides of the PNPLA3 mRNA sequence. In some embodiments, the target region of the PNPLA3 mRNA sequence to which the antisense strand comprises a region of complementarity can range from about 15 to about 30 consecutive nucleotides, from about 16 to about 28 consecutive nucleotides, from about 18 to about 26 consecutive nucleotides, from about 17 to about 24 consecutive nucleotides, from about 19 to about 25 consecutive nucleotides, from about 19 to about 23 consecutive nucleotides, or from about 19 to about 21 consecutive nucleotides. In certain embodiments, the region of the antisense strand comprising a sequence that is substantially or fully complementary to a PNPLA3 mRNA sequence may, in some embodiments, comprise at least 15 contiguous nucleotides from an antisense sequence selected from SEQ ID NOs: 565-1068 and SEQ ID NOs: 2329-3588 (see FIG. 1 or 2). In other embodiments, the antisense sequence comprises at least 16, at least 17, at least 18, or at least 19 contiguous nucleotides from an antisense sequence selected from SEQ ID NOs: 565-1068 and SEQ ID NOs: 2329-3588. In some embodiments, the sense and/or antisense sequence comprises at least 15 nucleotides from a sequence listed in FIG. 1 or 2 with no more than 1, 2, or 3 nucleotide mismatches.

[0036] The sense strand of the RNAi construct typically comprises a sequence that is sufficiently complementary to the sequence of the antisense strand such that the two strands hybridize under physiological conditions to form a duplex region. A “duplex region” refers to the region in two complementary or substantially complementary polynucleotides that form base pairs with one another, either by Watson-Crick base pairing or other hydrogen bonding interaction, to create a duplex between the two polynucleotides. The duplex region of the RNAi construct should be of sufficient length to allow the RNAi construct to enter the RNA interference pathway, e.g. by engaging the Dicer enzyme and/or the RISC complex (described below). For instance, in some embodiments, the duplex region is about 15 to about 30 base pairs in length. Other lengths for the duplex region within this range are also suitable, such as about 15 to about 28 base pairs, about 15 to about 26 base pairs, about 15 to about 24 base pairs, about 15 to about 22 base pairs, about 17 to about 28 base pairs, about 17 to about 26 base pairs, about 17 to about 24 base pairs, about 17 to about 23 base pairs, about 17 to about 21 base pairs, about 19 to about 25 base pairs, about 19 to about 23 base pairs, about 20 to about 25 base pairs, or about 19 to about 21 base pairs. In one embodiment, the duplex region is about 17 to about 24 base pairs in length. In another embodiment, the duplex region is about 19 to about 21 base pairs in length.

[0037] In some embodiments, an siRNA construct of the disclosure contains a duplex region of about 18 to about 30 nucleotides that interacts with a target RNA sequence, e.g., a PNPLA3 target mRNA sequence, to direct the cleavage of the target RNA. For example, the siRNA may comprise a duplex region of about 19, 20, 21, 22, 23, 24, 25, 26, 27, 28, or 29 nucleotides that interacts with a PNPLA3 target mRNA sequence. Without wishing to be bound by theory, long double-stranded RNA introduced into cells can be broken down into siRNA by a Type III endonuclease known as Dicer (Sharp et al. (2001) Genes Dev. 15:485). Dicer, a ribonuclease-III-like enzyme, processes the dsRNA into 19-23 base pair short interfering RNAs with characteristic two base 3′ overhangs (Bernstein, et al., (2001) Nature 409:363). The siRNAs are then incorporated into an RNA-induced silencing complex (RISC) where one or more helicases unwind the siRNA duplex, enabling the complementary antisense strand to guide target recognition (Nykanen, et al., (2001) Cell 107:309). Upon binding to the appropriate target mRNA, one or more endonucleases within the RISC cleave the target to induce silencing (Elbashir, et al., (2001) Genes Dev. 15: 188).

[0038] For embodiments in which the sense strand and antisense strand are two separate molecules (e.g., an siRNA RNAi construct), the sense strand and antisense strand need not be the same length as the length of the duplex region. For instance, one or both strands maybe longer than the duplex region and have one or more unpaired nucleotides or mismatches flanking the duplex region. Thus, in some embodiments, the RNAi construct comprises at least one nucleotide overhang. As used herein, a “nucleotide overhang” refers to the unpaired nucleotide or nucleotides that extend beyond the duplex region at the terminal ends of the strands. Nucleotide overhangs are typically created when the 3′ end of one strand extends beyond the 5′ end of the other strand or when the 5′ end of one strand extends beyond the 3′ end of the other strand. The length of a nucleotide overhang is generally between 1 and 6 nucleotides, 1 and 5 nucleotides, 1 and 4 nucleotides, 1 and 3 nucleotides, 2 and 6 nucleotides, 2 and 5 nucleotides, or 2 and 4 nucleotides. In some embodiments, the nucleotide overhang comprises 1, 2, 3, 4, 5, or 6 nucleotides. In one particular embodiment, the nucleotide overhang comprises 1 to 4 nucleotides. In certain embodiments, the nucleotide overhang comprises 2 nucleotides. The nucleotides in the overhang can be ribonucleotides, deoxyribonucleotides, or modified nucleotides as described herein. In some embodiments, the overhang comprises a 5′-uridineuridine-3′ (5′-UU-3′) dinucleotide. In such embodiments, the UU dinucleotide may comprise ribonucleotides or modified nucleotides, e.g., 2′-modified nucleotides. In other embodiments, the overhang comprises a 5′-deoxythymidine-deoxythymidine-3′ (5′-dTdT-3′) dinucleotide.

[0039] The nucleotide overhang can be at the 5′ end or 3′ end of one or both strands. For example, in one embodiment, the RNAi construct comprises a nucleotide overhang at the 5′ end and the 3′ end of the antisense strand. In another embodiment, the RNAi construct comprises a nucleotide overhang at the 5′ end and the 3′ end of the sense strand. In some embodiments, the RNAi construct comprises a nucleotide overhang at the 5′ end of the sense strand and the 5′ end of the antisense strand. In other embodiments, the RNAi construct comprises a nucleotide overhang at the 3′ end of the sense strand and the 3′ end of the antisense strand.

[0040] The RNAi constructs may comprise a single nucleotide overhang at one end of the double-stranded RNA molecule and a blunt end at the other. A “blunt end” means that the sense strand and antisense strand are fully base-paired at the end of the molecule and there are no unpaired nucleotides that extend beyond the duplex region. In some embodiments, the RNAi construct comprises a nucleotide overhang at the 3′ end of the sense strand and a blunt end at the 5′ end of the sense strand and 3′ end of the antisense strand. In other embodiments, the RNAi construct comprises a nucleotide overhang at the 3′ end of the antisense strand and a blunt end at the 5′ end of the antisense strand and the 3′ end of the sense strand. In certain embodiments, the RNAi construct comprises a blunt end at both ends of the double-stranded RNA molecule. In such embodiments, the sense strand and antisense strand have the same length and the duplex region is the same length as the sense and antisense strands (i.e., the molecule is double-stranded over its entire length).

[0041] The sense strand and antisense strand can each independently be any suitable length, such as about 15 to about 30 nucleotides in length, about 18 to about 28 nucleotides in length, about 19 to about 27 nucleotides in length, about 19 to about 25 nucleotides in length, about 19 to about 23 nucleotides in length, about 20 to about 25 nucleotides in length, or about 21 to about 23 nucleotides in length. In certain embodiments, the sense strand and antisense strand are each about 18, about 19, about 20, about 21, about 22, about 23, about 24, or about 25 nucleotides in length. In some embodiments, the sense strand and antisense strand are of the same length but form a duplex region that is shorter than the strands such that the RNAi construct has two nucleotide overhangs. For instance, in one embodiment, the RNAi construct comprises (i) a sense strand and an antisense strand that are each 21 nucleotides in length, (ii) a duplex region that is 19 base pairs in length, and (iii) nucleotide overhangs of 2 unpaired nucleotides at both the 3′ end of the sense strand and the 3′ end of the antisense strand. In another embodiment, the RNAi construct comprises (i) a sense strand and an antisense strand that are each 23 nucleotides in length, (ii) a duplex region that is 21 base pairs in length, and (iii) nucleotide overhangs of 2 unpaired nucleotides at both the 3′ end of the sense strand and the 3′ end of the antisense strand. In other embodiments, the sense strand and antisense strand have the same length and form a duplex region over their entire length such that there are no nucleotide overhangs on either end of the double-stranded molecule. In one such embodiment, the RNAi construct is blunt ended and comprises (i) a sense strand and an antisense strand, each of which is 21 nucleotides in length, and (ii) a duplex region that is 21 base pairs in length. In another embodiment, the RNAi construct is blunt ended and comprises (i) a sense strand and an antisense strand, each of which is 23 nucleotides in length, and (ii) a duplex region that is 23 base pairs in length.

[0042] In other embodiments, the sense strand or the antisense strand is longer than the other strand and the two strands form a duplex region having a length equal to that of the shorter strand such that the RNAi construct comprises at least one nucleotide overhang. For example, in one embodiment, the RNAi construct comprises (i) a sense strand that is 19 nucleotides in length, (ii) an antisense strand that is 21 nucleotides in length, (iii) a duplex region of 19 base pairs in length, and (iv) a single nucleotide overhang of 2 unpaired nucleotides at the 3′ end of the antisense strand. In another embodiment, the RNAi construct comprises (i) a sense strand that is 21 nucleotides in length, (ii) an antisense strand that is 23 nucleotides in length, (iii) a duplex region of 21 base pairs in length, and (iv) a single nucleotide overhang of 2 unpaired nucleotides at the 3′ end of the antisense strand.

[0043] The antisense strand of the RNAi constructs of the disclosure can comprise the sequence of any one of the antisense sequences listed in FIG. 1 or FIG. 2 (e.g., any one of SEQ ID NOs: 565-816 or SEQ ID NOs: 2329-2958), or the sequence of nucleotides 1-21 of any of these antisense sequences. Each of the antisense sequences of SEQ ID NOs: 565-816 and SEQ ID NOs: 2329-2958 comprises a sequence of 20 or 21 consecutive nucleotides (first 20 or 21 nucleotides counting from the 5′ end) that is complementary to a PNPLA3 mRNA sequence, plus an optional two-nucleotide overhang sequence. Thus, in some embodiments, the antisense strand comprises a sequence of nucleotides 1-20 or 1-21 of any one of SEQ ID NOs: 565-816 or SEQ ID NOs: 2329-2958.

### Modified Nucleotides

[0044] The RNAi constructs of the disclosure may comprise one or more modified nucleotides. A “modified nucleotide” refers to a nucleotide that has one or more chemical modifications to the nucleoside, nucleobase, pentose ring, or phosphate group. As used herein, modified nucleotides do not encompass ribonucleotides containing adenosine monophosphate, guanosine monophosphate, uridine monophosphate, and cytidine monophosphate, and deoxyribonucleotides containing deoxyadenosine monophosphate, deoxyguanosine monophosphate, deoxythymidine monophosphate, and deoxycytidine monophosphate. However, the RNAi constructs may comprise combinations of modified nucleotides, ribonucleotides, and deoxyribonucleotides. Incorporation of modified nucleotides into one or both strands of double-stranded RNA molecules can improve the in vivo stability of the RNA molecules, e.g., by reducing the molecules' susceptibility to nucleases and other degradation processes. The potency of RNAi constructs for reducing expression of the target gene can also be enhanced by incorporation of modified nucleotides.

[0045] In certain embodiments, the modified nucleotides have a modification of the ribose sugar. These sugar modifications can include modifications at the 2′ and/or 5′ position of the pentose ring as well as bicyclic sugar modifications. A 2′-modified nucleotide refers to a nucleotide having a pentose ring with a substituent at the 2′ position other than H or OH. Such 2′ modifications include, but are not limited to, 2′-O-alkyl (e.g. O—C1-C10 or O—C1-C10 substituted alkyl), 2′-O-allyl (O—CH2CH═CH2), 2′-C-allyl, 2′-fluoro, 2′-O-methyl (OCH3), 2′-O-methoxyethyl (O—(CH2)2OCH3), 2′-OCF3, 2′-O(CH2)2SCH3, 2′-O-aminoalkyl, 2′-amino (e.g., NH2), 2′-O-ethylamine, and 2′-azido. Modifications at the 5′ position of the pentose ring include, but are not limited to, 5′-methyl (R or S); 5′-vinyl, and 5′-methoxy.

[0046] A “bicyclic sugar modification” refers to a modification of the pentose ring where a bridge connects two atoms of the ring to form a second ring resulting in a bicyclic sugar structure. In some embodiments, the bicyclic sugar modification comprises a bridge between the 4′ and 2′ carbons of the pentose ring. Nucleotides comprising a sugar moiety with a bicyclic sugar modification are referred to herein as “bicyclic nucleic acids” or “BNAs.” Exemplary bicyclic sugar modifications include, but are not limited to, α-L-Methyleneoxy (4′-CH₂—O-2′) bicyclicnucleic acid (BNA); s-D-Methyleneoxy (4′-CH₂—O-2′) BNA (also referred to as a locked nucleic acid or LNA); Ethyleneoxy (4′-(CH₂)2-O-2′) BNA; Aminooxy (4′-CH₂—O—N(R)-2′)BNA; Oxyamino (4′-CH₂—N(R)—O-2′) BNA; Methyl(methyleneoxy) (4′-CH(CH₃)—O-2′) BNA (also referred to as constrained ethyl or cEt); methylene-thio (4′-CH₂—S-2′) BNA; methylene-amino (4′-CH₂—N(R)-2′) BNA; methyl carbocyclic (4′-CH₂—CH(CH₃)-2′) BNA; propylene carbocyclic (4′-(CH₂)3-2′) BNA; and Methoxy(ethyleneoxy) (4′-CH(CH₂OMe)-O-2′)BNA (also referred to as constrained MOE or cMOE). These and other sugar-modified nucleotides that can be incorporated into the RNAi constructs of the disclosure are described in, e.g., U.S. Pat. No. 9,181,551, U.S. Patent Publication No. 2016/0122761, and Deleavey and Damha, Chemistry and Biology, 19: 937-954 (2012).

[0047] In some embodiments, the RNAi constructs comprise one or more 2′-fluoro modified nucleotides, 2′-O-methyl modified nucleotides, 2′-O-methoxyethyl modified nucleotides, 2′-O-allyl modified nucleotides, bicyclic nucleic acids (BNAs), or combinations thereof. In certain embodiments, the RNAi constructs comprise one or more 2′-fluoro modified nucleotides, 2′-O-methyl modified nucleotides, 2′-O-methoxyethyl modified nucleotides, or combinations thereof. In one particular embodiment, the RNAi constructs comprise one or more 2′-fluoro modified nucleotides, 2′-O-methyl modified nucleotides, or combinations thereof.

[0048] Both the sense and antisense strands of the RNAi constructs can comprise one or multiple modified nucleotides. For instance, in some embodiments, the sense strand comprises 1, 2, 3, 4, 5, 6, 7, 8, 9, 10 or more modified nucleotides. In certain embodiments, all nucleotides in the sense strand are modified nucleotides. In some embodiments, the antisense strand comprises 1, 2, 3, 4, 5, 6, 7, 8, 9, 10 or more modified nucleotides. In other embodiments, all nucleotides in the antisense strand are modified nucleotides. In certain other embodiments, all nucleotides in the sense strand and all nucleotides in the antisense strand are modified nucleotides. In these and other embodiments, the modified nucleotides can be 2′-fluoro modified nucleotides, 2′-O-methyl modified nucleotides, or combinations thereof.

[0049] In some embodiments, all pyrimidine nucleotides preceding an adenosine nucleotide in the sense strand and/or in the antisense strand are modified nucleotides. For example, where the sequence 5′-CA-3′ or 5′-UA-3′ appears in either strand, the cytidine and uridine nucleotides are modified nucleotides, preferably 2′-O-methyl modified nucleotides. In certain embodiments, all pyrimidine nucleotides in the sense strand are modified nucleotides (e.g. 2′-O-methyl modified nucleotides), and the 5′ nucleotide in all occurrences of the sequence 5′-CA-3′ or 5′-UA-3′ in the antisense strand are modified nucleotides (e.g. 2′-O-methyl modified nucleotides). In other embodiments, all nucleotides in the duplex region are modified nucleotides. In such embodiments, the modified nucleotides are preferably 2′-O-methyl modified nucleotides, 2′-fluoro modified nucleotides, or combinations thereof.

[0050] In embodiments in which the RNAi construct comprises a nucleotide overhang, the nucleotides in the overhang can be ribonucleotides, deoxyribonucleotides, or modified nucleotides. In one embodiment, the nucleotides in the overhang are deoxyribonucleotides, e.g., deoxythymidine. In another embodiment, the nucleotides in the overhang are modified nucleotides. For instance, in some embodiments, the nucleotides in the overhang are 2′-O-methyl modified nucleotides, 2′-fluoro modified nucleotides, 2′-methoxyethyl modified nucleotides, or combinations thereof.

[0051] The RNAi constructs of the disclosure may also comprise one or more modified internucleotide linkages. As used herein, the term “modified internucleotide linkage” refers to an internucleotide linkage other than the natural 3′ to 5′ phosphodiester linkage. In some embodiments, the modified internucleotide linkage is a phosphorous-containing internucleotide linkage, such as a phosphotriester, an aminoalkyl phosphotriester, an alkylphosphonate (e.g., methylphosphonate, 3′-alkylene phosphonate), a phosphinate, a phosphoramidate (e.g., 3′-aminophosphoramidate and aminoalkylphosphoramidate), a phosphorothioate (P═S), a chiralphosphorothioate, a phosphorodithioate, a thionophosphoramidate, a thionoalkylphosphonate, athionoalkylphosphotriester, and a boranophosphate. In one embodiment, a modified internucleotide linkage is a 2′ to 5′ phosphodiester linkage. In other embodiments, the modified internucleotide linkage is a non-phosphorous-containing internucleotide linkage and thus can be referred to as a modified internucleoside linkage. Such non-phosphorous-containing linkages include, but are not limited to, morpholino linkages (formed in part from the sugar portion of a nucleoside); siloxane linkages (—O—Si(H)₂—O—); sulfide, sulfoxide and sulfone linkages; formacetyl and thioformacetyl linkages; alkene containing backbones; sulfamate backbones; methylenemethylimino (—CH₂—N(CH₃)—O—CH₂—) and methylenehydrazino linkages; sulfonate and sulfonamide linkages; amide linkages; and others having mixed N, O, S and CH₂ component parts. In one embodiment, the modified internucleoside linkage is a peptide-based linkage (e.g., aminoethylglycine) to create a peptide nucleic acid or PNA, such as those described in U.S. Pat. Nos. 5,539,082; 5,714,331; and 5,719,262. Other suitable modified internucleotide and internucleoside linkages that may be employed in the disclosed RNAi constructs are described in U.S. Pat. Nos. 6,693,187 and 9,181,551, U.S. Patent Publication No. 2016/0122761, and Deleavey and Damha, supra.

[0052] In certain embodiments, the RNAi constructs comprise one or more phosphorothioate internucleotide linkages. The phosphorothioate internucleotide linkages may be present in the sense strand, antisense strand, or both strands of the RNAi constructs. For instance, in some embodiments, the sense strand comprises 1, 2, 3, 4, 5, 6, 7, 8, or more phosphorothioate internucleotide linkages. In other embodiments, the antisense strand comprises 1, 2, 3, 4, 5, 6, 7, 8, or more phosphorothioate internucleotide linkages. In still other embodiments, both strands comprise 1, 2, 3, 4, 5, 6, 7, 8, or more phosphorothioate internucleotide linkages. The RNAi constructs can comprise one or more phosphorothioate internucleotide linkages at the 3′-end, the 5′-end, or both the 3′- and 5′-ends of the sense strand, the antisense strand, or both strands. For instance, in certain embodiments, the RNAi construct comprises about 1 to about 6 or more (e.g., about 1, 2, 3, 4, 5, 6 or more) consecutive phosphorothioate internucleotide linkages at the 3′-end of the sense strand, the antisense strand, or both strands. In other embodiments, the RNAi construct comprises about 1 to about 6 or more (e.g., about 1, 2, 3, 4, 5, 6 or more) consecutive phosphorothioate internucleotide linkages at the 5′-end of the sense strand, the antisense strand, or both strands. In one embodiment, the RNAi construct comprises a single phosphorothioate internucleotide linkage at the 3′ end of the sense strand and a single phosphorothioate internucleotide linkage at the 3′ end of the antisense strand. In another embodiment, the RNAi construct comprises two consecutive phosphorothioate internucleotide linkages at the 3′ end of the antisense strand (i.e., a phosphorothioate internucleotide linkage at the first and second internucleotide linkages at the 3′ end of the antisense strand). In another embodiment, the RNAi construct comprises two consecutive phosphorothioate internucleotide linkages at both the 3′ and 5′ ends of the antisense strand. In yet another embodiment, the RNAi construct comprises two consecutive phosphorothioate internucleotide linkages at both the 3′ and 5′ ends of the antisense strand and two consecutive phosphorothioate internucleotide linkages at the 5′ end of the sense strand. In still another embodiment, the RNAi construct comprises two consecutive phosphorothioate internucleotide linkages at both the 3′ and 5′ ends of the antisense strand and two consecutive phosphorothioate internucleotide linkages at both the 3′ and 5′ ends of the sense strand (i.e. a phosphorothioate internucleotide linkage at the first and second internucleotide linkages at both the 5′ and 3′ ends of the antisense strand and a phosphorothioate internucleotide linkage at the first and second internucleotide linkages at both the 5′ and 3′ ends of the sense strand). In any of the embodiments in which one or both strands comprise one or more phosphorothioate internucleotide linkages, the remaining internucleotide linkages within the strands can be the natural 3′ to 5′ phosphodiester linkages. For instance, in some embodiments, each internucleotide linkage of the sense and antisense strands is selected from phosphodiester and phosphorothioate, wherein at least one internucleotide linkage is a phosphorothioate.

[0053] In embodiments in which the RNAi construct comprises a nucleotide overhang, two or more of the unpaired nucleotides in the overhang can be connected by a phosphorothioate internucleotide linkage. In certain embodiments, all the unpaired nucleotides in a nucleotide overhang at the 3′ end of the antisense strand and/or the sense strand are connected by phosphorothioate internucleotide linkages. In other embodiments, all the unpaired nucleotides in a nucleotide overhang at the 5′ end of the antisense strand and/or the sense strand are connected by phosphorothioate internucleotide linkages. In still other embodiments, all the unpaired nucleotides in any nucleotide overhang are connected by phosphorothioate internucleotide linkages.

[0054] In certain embodiments, the modified nucleotides incorporated into one or both of the strands of the RNAi constructs of the disclosure have a modification of the nucleobase (also referred to herein as “base”). A “modified nucleobase” or “modified base” refers to a base other than the naturally occurring purine bases adenine (A) and guanine (G) and pyrimidine bases thymine (T), cytosine (C), and uracil (U). Modified nucleobases can be synthetic or naturally occurring modifications and include, but are not limited to, universal bases, 5-methylcytosine (5-me-C), 5-hydroxymethyl cytosine, xanthine (X), hypoxanthine (I), 2-aminoadenine, 6-methyladenine, 6-methylguanine, and other alkyl derivatives of adenine and guanine, 2-propyl and other alkyl derivatives of adenine and guanine, 2-thiouracil, 2-thiothymine and 2-thiocytosine, 5-halouracil and cytosine, 5-propynyl uracil and cytosine, 6-azo uracil, cytosine and thymine, 5-uracil (pseudouracil), 4-thiouracil, 8-halo, 8-amino, 8-thiol, 8-thioalkyl, 8-hydroxyl and other 8-substituted adenines and guanines, 5-halo, particularly 5-bromo, 5-trifluoromethyl and other 5-substituted uracils and cytosines, 7-methylguanine and 7-methyladenine, 8-azaguanine and 8-azaadenine, 7-deazaguanine and 7-daazaadenine and 3-deazaguanine, and 3-deazaadenine.

[0055] In some embodiments, the modified base is a universal base. A “universal base” refers to a base analog that indiscriminately forms base pairs with all of the natural bases in RNA and DNA without altering the double helical structure of the resulting duplex region. Universal bases are known to those of skill in the art and include, but are not limited to, inosine, C-phenyl, C-naphthyl and other aromatic derivatives, azole carboxamides, and nitroazole derivatives, such as 3-nitropyrrole, 4-nitroindole, 5-nitroindole, and 6-nitroindole.

[0056] Other suitable modified bases that can be incorporated into the disclosed RNAi constructs include those described in, for example, Herdewijn, Antisense Nucleic Acid Drug Dev., 10: 297-310 (2000) and Peacock et al., J. Org. Chem., 76: 7295-7300 (2011). The skilled person is well aware that guanine, cytosine, adenine, thymine, and uracil may be replaced by other nucleobases, such as the modified nucleobases described above, without substantially altering the base pairing properties of a polynucleotide comprising a nucleotide bearing such replacement nucleobase.

[0057] In some embodiments, the 5′ end of the sense strand, antisense strand, or both the antisense and sense strands of the disclosed RNAi constructs comprises a phosphate moiety. As used herein, the term “phosphate moiety” refers to a terminal phosphate group that includes unmodified phosphates (—O—P═O)(OH)OH) as well as modified phosphates. Modified phosphates include phosphates in which one or more of the O and OH groups are replaced with H, O, S, N(R) or alkyl where R is H, an amino protecting group or unsubstituted or substituted alkyl. Exemplary phosphate moieties include, but are not limited to, 5′-monophosphate; 5′diphosphate; 5′-triphosphate; 5′-guanosine cap (7-methylated or non-methylated); 5′-adenosinecap or any other modified or unmodified nucleotide cap structure; 5′-monothiophosphate (phosphorothioate); 5′-monodithiophosphate (phosphorodithioate); 5′-alpha-thiotriphosphate; 5′-gamma-thiotriphosphate, 5′-phosphoramidates; 5′-vinylphosphates; 5′-alkylphosphonates (wherein “alkyl” can be methyl, ethyl, isopropyl, propyl, etc.); and 5′-alkyletherphosphonates (wherein “alkylether” can be methoxymethyl, ethoxymethyl, etc.).

[0058] The modified nucleotides that can be incorporated into the RNAi constructs of the disclosure may have more than one chemical modification described herein. For instance, the modified nucleotide may have a modification to the ribose sugar as well as a modification to the nucleobase. By way of example, a modified nucleotide may comprise a 2′ sugar modification (e.g., 2′-fluoro or 2′-methyl) and comprise a modified base (e.g., 5-methyl cytosine or pseudouracil). In other embodiments, the modified nucleotide may comprise a sugar modification in combination with a modification to the 5′ phosphate that would create a modified internucleotide or internucleoside linkage when the modified nucleotide was incorporated into a polynucleotide. For instance, in some embodiments, the modified nucleotide may comprise a sugar modification, such as a 2′-fluoro modification, a 2′-O-methyl modification, or a bicyclic sugar modification, as well as a 5′ phosphorothioate group. Accordingly, in some embodiments, one or both strands of the RNAi constructs of the disclosure comprise a combination of 2′ modified nucleotides or BNAs and phosphorothioate internucleotide linkages. In certain embodiments, both the sense and antisense strands of the RNAi constructs of the disclosure comprise a combination of 2′-fluoro modified nucleotides, 2′-O-methyl modified nucleotides, and phosphorothioate internucleotide linkages. Exemplary siRNA constructs comprising modified nucleotides and internucleotide linkages are shown in FIG. 1 and FIG. 2.

[0059] The antisense strand of the RNAi constructs of the disclosure can comprise the sequence of any one of the modified antisense sequences listed in FIG. 1 or FIG. 2 (e.g., any one of SEQ ID NOs: 817-1068 or SEQ ID NOs: 2959-3588), or the sequence of nucleotides 1-21 of any of these antisense sequences. In some embodiments, the antisense strand comprises a sequence of nucleotides 1-20 or 1-21 of any one of SEQ ID NOs: 817-1068 or SEQ ID NOs: 2959-3588.

### Function of RNAi Constructs

[0060] The disclosed RNAi constructs desirably reduce or inhibit the expression of PNPLA3 in cells, particularly liver cells. Accordingly, in one embodiment, the present disclosure provides a method of reducing PNPLA3 expression in a cell by contacting the cell with any RNAi construct described herein. The cell may be in vitro or in vivo. PNPLA3 expression can be assessed by measuring the amount or level of PNPLA3 mRNA, PNPLA3 protein, or another biomarker linked to PNPLA3 expression. The reduction of PNPLA3 expression in cells or animals treated with an RNAi construct of the disclosure can be determined relative to the PNPLA3 expression in cells or animals not treated with the RNAi construct or treated with a control RNAi construct. For instance, in some embodiments, reduction of PNPLA3 expression is assessed by (a) measuring the amount or level of PNPLA3 mRNA in liver cells treated with a RNAi construct of the disclosure, (b) measuring the amount or level of PNPLA3 mRNA in liver cells treated with a control RNAi construct (e.g., RNAi construct directed to a RNA molecule not expressed in liver cells or a RNAi construct having a nonsense or scrambled sequence) or no construct, and (c) comparing the measured PNPLA3 mRNA levels from treated cells in (a) to the measured PNPLA3 mRNA levels from control cells in (b). The PNPLA3 mRNA levels in the treated cells and controls cells can be normalized to RNA levels for a control gene (e.g., 18S ribosomal RNA) prior to comparison. PNPLA3 mRNA levels can be measured by a variety of methods, including Northern blot analysis, nuclease protection assays, fluorescence in situ hybridization (FISH), reverse-transcriptase (RT)-PCR, real-time RT-PCR, quantitative PCR, and the like.

[0061] In other embodiments, reduction of PNPLA3 expression is assessed by (a) measuring the amount or level of PNPLA3 protein in liver cells treated with a RNAi construct described herein, (b) measuring the amount or level of PNPLA3 protein in liver cells treated with a control RNAi construct (e.g., RNAi construct directed to a RNA molecule not expressed in liver cells or a RNAi construct having a nonsense or scrambled sequence) or no construct, and (c) comparing the measured PNPLA3 protein levels from treated cells in (a) to the measured PNPLA3 protein levels from control cells in (b). PNPLA3 protein levels can be measured using any suitable method known to those of skill in the art, including but not limited to, western blots, immunoassays (e.g., ELISA), and flow cytometry. Any suitable method of measuring PNPLA3 mRNA or protein can be used to assess the efficacy of the RNAi constructs described herein.

[0062] In some embodiments, the methods to assess PNPLA3 expression levels are performed in vitro in cells that natively express PNPLA3 (e.g., liver cells) or cells that have been engineered to express PNPLA3. In certain embodiments, the methods are performed in vitro in liver cells. Suitable liver cells include, but are not limited to, primary hepatocytes (e.g. human, non-human primate, or rodent hepatocytes), HepAD38 cells, HuH-6 cells, HuH-7 cells, HuH-5-2 cells, BNLCL2 cells, Hep3B cells, or HepG2 cells. In one embodiment, the liver cells are Hep3B cells. In another embodiment, the liver cells are HepG2 cells.

[0063] In other embodiments, the methods to assess PNPLA3 expression levels are performed in vivo. For example, the RNAi constructs and any control RNAi constructs can be administered to an animal (e.g., rodent or non-human primate), and PNPLA3 mRNA or protein levels may be assessed in liver tissue harvested from the animal following treatment. Alternatively or additionally, a biomarker or functional phenotype associated with PNPLA3 expression can be assessed in the treated animals.

[0064] In certain embodiments, expression of PNPLA3 is reduced in liver cells by at least 10%, at least 15%, at least 20%, at least 25%, at least 30%, at least 35%, at least 40%, at least 45%, or at least 50% by an RNAi construct described herein. In some embodiments, expression of PNPLA3 is reduced in liver cells by at least 60%, at least 65%, at least 70%, at least 75%, at least 80%, or at least 85% by an RNAi construct described herein. In other embodiments, the expression of PNPLA3 is reduced in liver cells by about 90% or more, e.g., 91%, 92%, 93%, 94%, 95%, 96%, 97%, 98%, 99%, or more by an RNAi construct described herein. The percent reduction of PNPLA3 expression can be measured by any of the methods described herein or otherwise known in the art. For instance, in certain embodiments, the RNAi constructs described herein inhibit at least 60% of PNPLA3 expression at 5 nM in Hep3B cells (contains wild type PNPLA3) in vitro. In related embodiments, the RNAi constructs described herein inhibit at least 65%, at least 70%, at least 75%, at least 80%, at least 85%, or at least 90% of PNPLA3 expression at 5 nM in Hep3B cells in vitro. In other embodiments, the RNAi constructs described herein inhibit at least 91%, at least 92%, at least 93%, at least 94%, at least 95%, at least 96%, at least 97%, at least 98%, at least 99%, or 100% of PNPLA3 expression at 5 nM in Hep3B cells in vitro. In certain embodiments, the RNAi constructs described herein inhibit at least 60% of PNPLA3 expression at 5 nM in HepG2 cells (contains wild type PNPLA3) in vitro. In related embodiments, the RNAi constructs described herein inhibit at least 65%, at least 70%, at least 75%, at least 80%, at least 85%, or at least 90% of PNPLA3 expression at 5 nM in HepG2 cells in vitro. In other embodiments, the RNAi constructs described herein inhibit at least 91%, at least 92%, at least 93%, at least 94%, at least 95%, at least 96%, at least 97%, at least 98%, at least 99%, or 100% of PNPLA3 expression at 5 nM in HepG2 cells in vitro. Reduction of PNPLA3 can be measured using a variety of techniques including, for example, RNA FISH or droplet digital PCR (see, e.g., Kamitaki et al., Digital PCR. Methods in Molecular Biology, 1768: 401-422 (2018). doi:10.1007/978-1-4939-7778-9_23).

[0065] In some embodiments, an IC₅₀ value is calculated to assess the potency of an RNAi construct described herein for inhibiting PNPLA3 expression in liver cells. An “IC₅₀ value” is the dose/concentration required to achieve 50% inhibition of a biological or biochemical function. The IC₅₀ value of any substance or antagonist can be determined by constructing a dose-response curve and examining the effect of different concentrations of the substance or antagonist on expression levels or functional activity in any assay. IC₅₀ values can be calculated for a given antagonist or substance by determining the concentration needed to inhibit half of the maximum biological response or native expression levels. Thus, the IC₅₀ value for any RNAi construct can be calculated by determining the concentration of the RNAi construct needed to inhibit half of the native PNPLA3 expression level in liver cells (e.g., PNPLA3 expression level in control liver cells) in any assay, such as an immunoassay, RNA FISH assay, or a droplet digital PCR assay. The RNAi constructs described herein may inhibit PNPLA3 expression in liver cells (e.g. Hep3B cells or HepG2 cells) with an IC₅₀ of less than about 40 nM (e.g., less than about 35, nM, 30 nM, 25 nM, 20 nM, 15 nM, 10 nM, 5 nM, or 1 nM). For example, the disclosed RNAi constructs may inhibit PNPLA3 expression in liver cells with an IC₅₀ of about 0.001 nM to about 40 nM, about 0.001 nM to about 30 nM, about 0.001 nM to about 20 nM, about 0.001 nM to about 10 nM, about 0.001 nM to about 5 nM, about 0.001 nM to about 1 nM, about 0.1 nM to about 10 nM, about 0.1 nM to about 5 nM, or about 0.1 nM to about 1 nM.

[0066] The RNAi constructs described herein can readily be made using techniques known in the art, such as, for example, conventional nucleic acid solid phase synthesis. The polynucleotides of the RNAi constructs can be assembled on a suitable nucleic acid synthesizer utilizing standard nucleotide or nucleoside precursors (e.g., phosphoramidites). Automated nucleic acid synthesizers are sold commercially by several vendors, including DNA/RNA synthesizers from Applied Biosystems (Foster City, CA), MerMade synthesizers from BioAutomation (Irving, TX), and OligoPilot synthesizers from GE Healthcare Life Sciences (Pittsburgh, PA).

[0067] The 2′ silyl protecting group can be used in conjunction with acid labile dimethoxytrityl (DMT) at the 5′ position of ribonucleosides to synthesize oligonucleotides via phosphoramidite chemistry. Final deprotection conditions are known not to significantly degrade RNA products. All syntheses can be conducted in any automated or manual synthesizer on large, medium, or small scale. The syntheses may also be carried out in multiple well plates, columns, or glass slides.

[0068] The 2′-O-silyl group can be removed via exposure to fluoride ions, which can include any source of fluoride ion, e.g., those salts containing fluoride ion paired with inorganic counterions, e.g., cesium fluoride and potassium fluoride or those salts containing fluoride ion paired with an organic counterion, e.g., a tetraalkylammonium fluoride. A crown ether catalyst can be utilized in combination with the inorganic fluoride in the deprotection reaction. Exemplary fluoride ion sources include, but are not limited to, tetrabutylammonium fluoride or aminohydrofluorides (e.g., combining aqueous HF with triethylamine in a dipolar aprotic solvent, e.g., dimethylformamide).

[0069] The choice of protecting groups for use on the phosphite triesters and phosphotriesters can alter the stability of the triesters towards fluoride. Methyl protection of the phosphotriester or phosphitetriester can stabilize the linkage against fluoride ions and improve process yields.

[0070] Since ribonucleosides have a reactive 2′ hydroxyl substituent, it may be desirable to protect the reactive 2′ position in RNA with a protecting group that is orthogonal to a 5′-O-dimethoxytrityl protecting group, e.g., one stable to treatment with acid. Silyl protecting groups meet this criterion and can be readily removed in a final fluoride deprotection step that can result in minimal RNA degradation.

[0071] Tetrazole catalysts can be used in the standard phosphoramidite coupling reaction. Exemplary catalysts include, e.g., tetrazole, S-ethyl-tetrazole, benzylthiotetrazole, and pnitrophenyltetrazole.

[0072] Additional methods of synthesizing the RNAi constructs described herein will be evident to those of ordinary skill in the art. Additionally, the various synthetic steps may be performed in an alternate sequence or order to give the desired compounds. Other synthetic chemistry transformations, protecting groups (e.g., for hydroxyl, amino, etc., present on the bases) and protecting group methodologies (protection and deprotection) useful in synthesizing the RNAi constructs described herein are known in the art and include, for example, those described in R. Larock, Comprehensive Organic Transformations, VCH Publishers (1989); T. W. Greene and P. G. M. Wuts, Protective Groups in Organic Synthesis, 2d. Ed., John Wiley and Sons (1991); L. Fieser and M. Fieser, Fieser and Fieser's Reagents for Organic Synthesis, John Wiley and Sons (1994); and L. Paquette, ed., Encyclopedia of Reagents for Organic Synthesis, John Wiley and Sons (1995), and subsequent editions thereof. Custom synthesis of RNAi constructs is also available from several commercial vendors, including Dharmacon, Inc. (Lafayette, CO), AxoLabs GmbH (Kulmbach, Germany), and Ambion, Inc. (Foster City, CA).

[0073] The RNAi constructs described herein may comprise a ligand. As used herein, a “ligand” refers to any compound or molecule that can interact with another compound or molecule, either directly or indirectly. The interaction of a ligand with another compound or molecule may elicit a biological response (e.g., initiate a signal transduction cascade, induce receptor mediated endocytosis) or may just be a physical association. The ligand can modify one or more properties of the double-stranded RNA molecule to which is attached, such as the pharmacodynamic, pharmacokinetic, binding, absorption, cellular distribution, cellular uptake, charge and/or clearance properties of the RNA molecule.

[0074] The ligand may comprise a serum protein (e.g., human serum albumin, low-density lipoprotein, globulin), a cholesterol moiety, a vitamin (e.g., biotin, vitamin E, vitamin B12), a folate moiety, a steroid, a bile acid (e.g., cholic acid), a fatty acid (e.g., palmitic acid, myristic acid), a carbohydrate (e.g., a dextran, pullulan, chitin, chitosan, inulin, cyclodextrin or hyaluronic acid), a glycoside, a phospholipid, or an antibody or binding fragment thereof (e.g., a whole antibody or binding fragment that targets the RNAi construct to a specific cell type, such as liver cells). Other examples of ligands include dyes, intercalating agents (e.g., acridines), cross-linkers (e.g., psoralene, mitomycin C), porphyrins (e.g., TPPC4, texaphyrin, Sapphyrin), polycyclic aromatic hydrocarbons (e.g., phenazine, dihydrophenazine), artificial endonucleases (e.g., EDTA), lipophilic molecules (e.g., adamantane acetic acid, 1-pyrene butyric acid, dihydrotestosterone, 1,3-BisO(hexadecyl)glycerol, geranyloxyhexyl group, hexadecylglycerol, borneol, menthol, 1,3-propanediol, heptadecyl group, 03-(oleoyl)lithocholic acid, 03-(oleoyl)cholenic acid, dimethoxytrityl, or phenoxazine), peptides (e.g., antennapedia peptide, Tat peptide, RGD peptides), alkylating agents, polymers (e.g., polyethylene glycol (PEG), PEG-40K), poly amino acids, and polyamines (e.g., spermine, spermidine).

[0075] In certain embodiments, the ligands have endosomolytic properties. The endosomolytic ligands promote the lysis of the endosome and/or transport of the RNAi construct described herein, or its components, from the endosome to the cytoplasm of the cell. The endosomolytic ligand may be a polycationic peptide or peptidomimetic which shows pH-dependent membrane activity and fusogenicity. In one embodiment, the endosomolytic ligand assumes its active conformation at endosomal pH. The “active” conformation is that conformation in which the endosomolytic ligand promotes lysis of the endosome and/or transport of the RNAi construct described herein, or its components, from the endosome to the cytoplasm of the cell. Exemplary endosomolytic ligands include the GALA peptide (Subbarao et al., Biochemistry, Vol. 26: 2964-2972, 1987), the EALA peptide (Vogel et al., J. Am. Chem. Soc., Vol. 118: 1581-1586, 1996), and their derivatives (Turk et al., Biochem. Biophys. Acta, Vol. 1559: 56-68, 2002). In one embodiment, the endosomolytic component may contain a chemical group (e.g., an amino acid) which will undergo a change in charge or protonation in response to a change in pH. The endosomolytic component may be linear or branched.

[0076] In some embodiments, the ligand comprises a lipid or other hydrophobic molecule. In one embodiment, the ligand comprises a cholesterol moiety or other steroid. Cholesterol conjugated oligonucleotides have been reported to be more active than their unconjugated counterparts (Manoharan, Antisense Nucleic Acid Drug Development, Vol. 12: 103-228, 2002). Ligands comprising cholesterol moieties and other lipids for conjugation to nucleic acid molecules have also been described in U.S. Pat. Nos. 7,851,615; 7,745,608; and 7,833,992. In another embodiment, the ligand may comprise a folate moiety. Polynucleotides conjugated to folate moieties can be taken up by cells via a receptor-mediated endocytosis pathway. Such folate-polynucleotide conjugates are described in, e.g., U.S. Pat. No. 8,188,247.

[0077] Given that PNPLA3 is expressed in liver cells (e.g., hepatocytes), in certain embodiments, it is desirable to specifically deliver the RNAi construct to liver cells. In some embodiments, RNAi constructs can be specifically targeted to the liver by employing ligands that bind to or interact with proteins expressed on the surface of liver cells. For example, in certain embodiments, a ligand may comprise one or more antigen binding proteins (e.g. antibodies or binding fragments thereof (e.g. Fab, scFv)) that specifically bind to a receptor expressed on hepatocytes.

[0078] In certain embodiments, the ligand comprises a carbohydrate. A “carbohydrate” refers to a compound made up of one or more monosaccharide units having at least 6 carbon atoms (which can be linear, branched, or cyclic) with an oxygen, nitrogen or sulfur atom bonded to each carbon atom. Carbohydrates include, but are not limited to, sugars (e.g., monosaccharides, disaccharides, trisaccharides, tetrasaccharides, and oligosaccharides containing from about 4, 5, 6, 7, 8, or 9 monosaccharide units), and polysaccharides, such as starches, glycogen, cellulose, and polysaccharide gums. In some embodiments, the carbohydrate incorporated into the ligand is a monosaccharide selected from a pentose, hexose, or heptose and di- and tri-saccharides including such monosaccharide units. In other embodiments, the carbohydrate incorporated into the ligand is an amino sugar, such as galactosamine, glucosamine, N-acetylgalactosamine, and N-acetylglucosamine.

[0079] In some embodiments, the ligand comprises a hexose or hexosamine. The hexose may be selected from glucose, galactose, mannose, fucose, or fructose. The hexosamine may be selected from fructosamine, galactosamine, glucosamine, or mannosamine. In certain embodiments, the ligand comprises glucose, galactose, galactosamine, or glucosamine. In one embodiment, the ligand comprises glucose, glucosamine, or N-acetylglucosamine. In another embodiment, the ligand comprises galactose, galactosamine, or N-acetyl-galactosamine. In particular embodiments, the ligand comprises N-acetyl-galactosamine. Ligands comprising glucose, galactose, and N-acetyl-galactosamine (GalNAc) are particularly effective in targeting compounds to liver cells (see, e.g., D'Souza and Devarajan, J. Control Release, Vol. 203: 126-139, 2015). Examples of GalNAc- or galactose-containing ligands that can be incorporated into the RNAi constructs described herein are described in U.S. Pat. Nos. 7,491,805; 8,106,022; and 8,877,917; U.S. Patent Publication No. 2003/0130186; and WIPO Publication No. WO 2013/166155.

[0080] In certain embodiments, the ligand comprises a multivalent carbohydrate moiety. As used herein, a “multivalent carbohydrate moiety” refers to a moiety comprising two or more carbohydrate units capable of independently binding or interacting with other molecules. For example, a multivalent carbohydrate moiety comprises two or more binding domains comprised of carbohydrates that can bind to two or more different molecules or two or more different sites on the same molecule. The valency of the carbohydrate moiety denotes the number of individual binding domains within the carbohydrate moiety. For instance, the terms “monovalent,” “bivalent,” “trivalent,” and “tetravalent” with reference to the carbohydrate moiety refer to carbohydrate moieties with one, two, three, and four binding domains, respectively. The multivalent carbohydrate moiety may comprise a multivalent lactose moiety, a multivalent galactose moiety, a multivalent glucose moiety, a multivalent N-acetyl-galactosamine moiety, a multivalent N-acetyl-glucosamine moiety, a multivalent mannose moiety, or a multivalent fucose moiety. In some embodiments, the ligand comprises a multivalent galactose moiety. In other embodiments, the ligand comprises a multivalent N-acetyl-galactosamine moiety. In these and other embodiments, the multivalent carbohydrate moiety is bivalent, trivalent, or tetravalent. In such embodiments, the multivalent carbohydrate moiety can be bi-antennary or tri-antennary. In one particular embodiment, the multivalent N-acetyl-galactosamine moiety is trivalent or tetravalent. In another particular embodiment, the multivalent galactose moiety is trivalent or tetravalent. Exemplary trivalent and tetravalent GalNAc-containing ligands for incorporation into the RNAi constructs are described in detail below.

[0081] The ligand can be attached or conjugated to the RNA molecule of the RNAi construct directly or indirectly. For instance, in some embodiments, the ligand is covalently attached directly to the sense or antisense strand of the RNAi construct. In other embodiments, the ligand is covalently attached via a linker to the sense or antisense strand of the RNAi construct. The ligand can be attached to nucleobases, sugar moieties, or internucleotide linkages of polynucleotides (e.g., sense strand or antisense strand) of the RNAi constructs described herein. Conjugation or attachment to purine nucleobases or derivatives thereof can occur at any position including, endocyclic and exocyclic atoms. In certain embodiments, the 2-, 6-, 7-, or 8-positions of a purine nucleobase are attached to a ligand. Conjugation or attachment to pyrimidine nucleobases or derivatives thereof can also occur at any position. In some embodiments, the 2, 5-, and 6-positions of a pyrimidine nucleobase can be attached to a ligand. Conjugation or attachment to sugar moieties of nucleotides can occur at any carbon atom. Example carbon atoms of a sugar moiety that can be attached to a ligand include the 2′, 3′, and 5′ carbon atoms. The 1′ position can also be attached to a ligand, such as in a basic residue. Internucleotide linkages can also support ligand attachments. For phosphorus-containing linkages (e.g., phosphodiester, phosphorothioate, phosphorodithiotate, phosphoroamidate, and the like), the ligand can be attached directly to the phosphorus atom or to an O, N, or S atom bound to the phosphorus atom. For amine- or amide-containing internucleoside linkages (e.g., PNA), the ligand can be attached to the nitrogen atom of the amine or amide or to an adjacent carbon atom.

[0082] In certain embodiments, the ligand may be attached to the 3′ or 5′ end of either the sense or antisense strand. In certain embodiments, the ligand is covalently attached to the 5′ end of the sense strand. In other embodiments, the ligand is covalently attached to the 3′ end of the sense strand. For example, in some embodiments, the ligand is attached to the 3′-terminal nucleotide of the sense strand. In certain such embodiments, the ligand is attached at the 3′-position of the 3′-terminal nucleotide of the sense strand. In alternative embodiments, the ligand is attached near the 3′ end of the sense strand, but before one or more terminal nucleotides (i.e. before 1, 2, 3, or 4 terminal nucleotides). In some embodiments, the ligand is attached at the 2′-position of the sugar of the 3′-terminal nucleotide of the sense strand.

[0083] In certain embodiments, the ligand is attached to the sense or antisense strand via a linker. A “linker” is an atom or group of atoms that covalently joins a ligand to a polynucleotide component of the RNAi construct. The linker may be from about 1 to about 30 atoms in length, from about 2 to about 28 atoms in length, from about 3 to about 26 atoms in length, from about 4 to about 24 atoms in length, from about 6 to about 20 atoms in length, from about 7 to about 20 atoms in length, from about 8 to about 20 atoms in length, from about 8 to about 18 atoms in length, from about 10 to about 18 atoms in length, and from about 12 to about 18 atoms in length. In some embodiments, the linker may comprise a bifunctional linking moiety, which generally comprises an alkyl moiety with two functional groups. One of the functional groups is selected to bind to the compound of interest (e.g., sense or antisense strand of the RNAi construct) and the other is selected to bind essentially any selected group, such as a ligand as described herein. In certain embodiments, the linker comprises a chain structure or an oligomer of repeating units, such as ethylene glycol or amino acid units. Examples of functional groups that are typically employed in a bifunctional linking moiety include, but are not limited to, electrophiles for reacting with nucleophilic groups and nucleophiles for reacting with electrophilic groups. In some embodiments, bifunctional linking moieties include amino, hydroxyl, carboxylic acid, thiol, unsaturations (e.g., double or triple bonds), and the like.

[0084] Linkers that may be used to attach a ligand to the sense or antisense strand in the RNAi constructs described herein include, but are not limited to, pyrrolidine, 8-amino-3,6-di oxaoctanoic acid, succinimidyl 4-(N-maleimidomethyl)cyclohexane-1-carboxylate, 6-aminohexanoic acid, substituted C₁-C₁₀ alkyl, substituted or unsubstituted C₂-C₁₀ alkenyl or substituted or unsubstituted C₂-C₁₀ alkynyl. Preferred substituent groups for such linkers include, but are not limited to, hydroxyl, amino, alkoxy, carboxy, benzyl, phenyl, nitro, thiol, thioalkoxy, halogen, alkyl, aryl, alkenyl, and alkynyl.

[0085] In certain embodiments, the linkers are cleavable. A cleavable linker is one which is sufficiently stable outside the cell, but which upon entry into a target cell is cleaved to release the two parts the linker is holding together. In some embodiments, the cleavable linker is cleaved at least 10 times, 20 times, 30 times, 40 times, 50 times, 60 times, 70 times, 80 times, 90 times, or more, or at least 100 times faster in the target cell or under a first reference condition (which can, e.g., be selected to mimic or represent intracellular conditions) than in the blood of a subject, or under a second reference condition (which can, e.g., be selected to mimic or represent conditions found in the blood or serum).

[0086] Cleavable linkers are susceptible to cleavage agents, e.g., pH, redox potential, or the presence of degradative molecules. Generally, cleavage agents are more prevalent or found at higher levels or activities inside cells than in serum or blood. Examples of such degradative agents include: redox agents which are selected for particular substrates or which have no substrate specificity, including, e.g., oxidative or reductive enzymes or reductive agents such as mercaptans, present in cells, that can degrade a redox cleavable linker by reduction; esterases; endosomes or agents that can create an acidic environment, e.g., those that result in a pH of five or lower; enzymes that can hydrolyze or degrade an acid cleavable linker by acting as a general acid, peptidases (which can be substrate specific), and phosphatases.

[0087] A cleavable linker may comprise a moiety that is susceptible to pH. The pH of human serum is 7.4, while the average intracellular pH is slightly lower, ranging from about 7.1-7.3. Endosomes have a more acidic pH, in the range of 5.5-6.0, and lysosomes have an even more acidic pH at around 5.0. Some linkers will have a cleavable group that is cleaved at a preferred pH, thereby releasing the RNA molecule from the ligand inside the cell, or into the desired compartment of the cell.

[0088] A linker can include a cleavable group that is cleavable by a particular enzyme. The type of cleavable group incorporated into a linker can depend on the cell to be targeted. For example, liver-targeting ligands can be linked to RNA molecules through a linker that includes an ester group. Liver cells are rich in esterases, and therefore the linker will be cleaved more efficiently in liver cells than in cell types that are not esterase-rich. Other types of cells rich in esterases include cells of the lung, renal cortex, and testis. Linkers that contain peptide bonds can be used when targeting cells rich in peptidases, such as liver cells and synoviocytes.

[0089] In general, the suitability of a candidate cleavable linker can be evaluated by testing the ability of a degradative agent (or condition) to cleave the candidate linker. It will also be desirable to also test the candidate cleavable linker for the ability to resist cleavage in the blood or when in contact with other non-target tissue. Thus, one can determine the relative susceptibility to cleavage between a first and a second condition, where the first is selected to be indicative of cleavage in a target cell and the second is selected to be indicative of cleavage in other tissues or biological fluids, e.g., blood or serum. The evaluations can be carried out in cell free systems, in cells, in cell culture, in organ or tissue culture, or in whole animals. It may be useful to make initial evaluations in cell-free or culture conditions and to confirm by further evaluations in whole animals. In some embodiments, useful candidate linkers are cleaved at least 2, 4, 10, 20, 50, 70, or 100 times faster in the cell (or under in vitro conditions selected to mimic intracellular conditions) as compared to blood or serum (or under in vitro conditions selected to mimic extracellular conditions).

[0090] In other embodiments, redox cleavable linkers are utilized. Redox cleavable linkers are cleaved upon reduction or oxidation. An example of reductively cleavable group is a disulfide linking group (—S—S—). To determine if a candidate cleavable linker is a suitable “reductively cleavable linker,” or, for example, is suitable for use with a particular RNAi construct and particular ligand, one or more methods described herein can be used. For example, a candidate linker can be evaluated by incubation with dithiothreitol (DTT), or other reducing agent known in the art, which mimics the rate of cleavage that would be observed in a cell, e.g., a target cell. The candidate linkers can also be evaluated under conditions which are selected to mimic blood or serum conditions. In a specific embodiment, candidate linkers are cleaved by at most 10% in the blood. In other embodiments, useful candidate linkers are degraded at least 2, 4, 10, 20, 50, 70, or 100 times faster in the cell (or under in vitro conditions selected to mimic intracellular conditions) as compared to blood (or under in vitro conditions selected to mimic extracellular conditions).

[0091] In yet other embodiments, phosphate-based cleavable linkers are cleaved by agents that degrade or hydrolyze the phosphate group. An example of an agent that hydrolyzes phosphate groups in cells are enzymes, such as phosphatases in cells. Examples of phosphate-based cleavable groups are —O—P(O)(ORk)-O—, —O—P(S)(ORk)-O—, —O—P(S)(SRk)-O—, —S—P(O)(ORk)-O—, —O—P(O)(ORk)-S—, —S—P(O)(ORk)-S—, —O—P(S)(ORk)-S—, —S—P(S)(ORk)-O—, —O—P(O)(Rk)-O—, —O—P(S)(Rk)-O—, —S—P(O)(Rk)-O—, —S—P(S)(Rk)-O—, —S—P(O)(Rk)-S—, —O—P(S)(Rk)-S—. Specific embodiments include —O—P(O)(OH)—O—, —O—P(S)(OH)—O—, —O—P(S)(SH)—O—, —S—P(O)(OH)—O—, —O—P(O)(OH)—S—, —S—P(O)(OH)—S—, —O—P(S)(OH)—S—, —SP(S)(OH)—O—, —O—P(O)(H)—O—, —O—P(S)(H)—O—, —S—P(O)(H)—O—, —S—P(S)(H)—O—, —S—P(O)(H)—S—, —O—P(S)(H)—S—. Another specific embodiment is —O—P(O)(OH)—O—. These candidate linkers can be evaluated using methods analogous to those described above.

[0092] In other embodiments, the linkers may comprise acid cleavable groups, which are groups that are cleaved under acidic conditions. In some embodiments, acid cleavable groups are cleaved in an acidic environment with a pH of about 6.5 or lower (e.g., about 6.0, 5.5, 5.0, or lower), or by agents, such as enzymes that can act as a general acid. In a cell, specific low pH organelles, such as endosomes and lysosomes, can provide a cleaving environment for acid cleavable groups. Examples of acid cleavable linking groups include, but are not limited to, hydrazones, esters, and esters of amino acids. Acid cleavable groups can have the general formula —C═NN—, C(O)O, or —OC(O). A specific embodiment is when the carbon attached to the oxygen of the ester (the alkoxy group) is an aryl group, substituted alkyl group, or tertiaryalkyl group such as dimethyl, pentyl or t-butyl. These candidates can be evaluated using methods analogous to those described above.

[0093] In other embodiments, the linkers may comprise ester-based cleavable groups, which are cleaved by enzymes, such as esterases and amidases in cells. Examples of ester-based cleavable groups include, but are not limited to, esters of alkylene, alkenylene and alkynylene groups. Ester cleavable groups have the general formula —C(O)O—, or —OC(O)—. These candidate linkers can be evaluated using methods analogous to those described above.

[0094] In further embodiments, the linkers may comprise peptide-based cleavable groups, which are cleaved by enzymes, such as peptidases and proteases in cells. Peptide-based cleavable groups are peptide bonds formed between amino acids to yield oligopeptides (e.g., dipeptides, tripeptides etc.) and polypeptides. Peptide-based cleavable groups do not include the amide group (—C(O)NH—). The amide group can be formed between any alkylene, alkenylene or alkynelene. A peptide bond is a special type of amide bond formed between amino acids to yield peptides and proteins. The peptide-based cleavage group is generally limited to the peptide bond (i.e., the amide bond) formed between amino acids yielding peptides and proteins and does not include the entire amide functional group. Peptide-based cleavable linking groups have the general formula —NHCHRAC(O)NHCHRBC(O)—, where RA and RB are the R groups of the two adjacent amino acids. These candidates can be evaluated using methods analogous to those described above.

[0095] Other types of linkers suitable for attaching ligands to the sense or antisense strands in the RNAi constructs described herein are known in the art and can include the linkers described in, e.g., U.S. Pat. Nos. 7,723,509; 8,017,762; 8,828,956; 8,877,917; and 9,181,551.

[0096] In certain embodiments, the ligand covalently attached to the sense or antisense strand of the RNAi constructs described herein comprises a GalNAc moiety, e.g, a multivalent GalNAc moiety. In some embodiments, the multivalent GalNAc moiety is a trivalent GalNAc moiety and is attached to the 3′ end of the sense strand. In other embodiments, the multivalent GalNAc moiety is a trivalent GalNAc moiety and is attached to the 5′ end of the sense strand. In yet other embodiments, the multivalent GalNAc moiety is a tetravalent GalNAc moiety and is attached to the 3′ end of the sense strand. In still other embodiments, the multivalent GalNAc moiety is a tetravalent GalNAc moiety and is attached to the 5′ end of the sense strand.

[0097] In some embodiments, the RNAi constructs described herein may be delivered to a cell or tissue of interest by administering a vector that encodes and controls the intracellular expression of the RNAi construct. A “vector” (also referred to herein as an “expression vector”) is a composition of matter which can be used to deliver a nucleic acid of interest to the interior of a cell. Numerous vectors are known in the art including, but not limited to, linear polynucleotides, polynucleotides associated with ionic or amphiphilic compounds, plasmids, and viruses. Thus, the term “vector” includes an autonomously replicating plasmid or a virus. Examples of viral vectors include, but are not limited to, adenoviral vectors, adeno-associated viral vectors, retroviral vectors, and the like. A vector can be replicated in a living cell, or it can be made synthetically.

[0098] Generally, a vector for expressing an RNAi construct described herein will comprise one or more promoters operably linked to sequences encoding the RNAi construct. The phrases “operably linked,” “operatively linked,” or “under transcriptional control” may be used interchangeably herein to indicate when a promoter is in the correct location and orientation in relation to a polynucleotide sequence to control the initiation of transcription by RNA polymerase and expression of the polynucleotide sequence. A “promoter” refers to a sequence recognized by the synthetic machinery of the cell, or introduced synthetic machinery, required to initiate the specific transcription of a gene sequence. Suitable promoters include, but are not limited to, RNA pol I, pol II, HI or U6 RNA pol III, and viral promoters (e.g., human cytomegalovirus (CMV) immediate early gene promoter, the SV40 early promoter, and the Rous sarcoma virus long terminal repeat). In some embodiments, an HI or U6RNA pol III promoter is employed. The promoter can be a tissue-specific or inducible promoter. Of particular interest are liver-specific promoters, such as promoter sequences from the human alpha-1 antitrypsin gene, albumin gene, hemopexin gene, and hepatic lipase gene. Inducible promoters include, for example, promoters regulated by ecdysone, estrogen, progesterone, tetracycline, and isopropyl-PD1-thiogalactopyranoside (IPTG).

[0099] When the RNAi construct comprises an siRNA, the two separate strands (sense and antisense strand) can be expressed from a single vector or two separate vectors. For example, in some embodiments, the sequence encoding the sense strand is operably linked to a promoter on a first vector and the sequence encoding the antisense strand is operably linked to a promoter on a second vector. In such an embodiment, the first and second vectors are co-introduced, e.g., by infection or transfection, into a target cell, such that the sense and antisense strands, once transcribed, will hybridize intracellularly to form the siRNA molecule. In another embodiment, the sense and antisense strands are transcribed from two separate promoters located in a single vector. In such embodiments, the sequence encoding the sense strand may be operably linked to a first promoter and the sequence encoding the antisense strand may be operably linked to a second promoter, wherein the first and second promoters are located in a single vector. In one embodiment, the vector comprises a first promoter operably linked to a sequence encoding the siRNA molecule, and a second promoter operably linked to the same sequence in the opposite direction, such that transcription of the sequence from the first promoter results in the synthesis of the sense strand of the siRNA molecule and transcription of the sequence from the second promoter results in synthesis of the antisense strand of the siRNA molecule.

[0100] When the RNAi construct comprises a shRNA, a sequence encoding the single, at least partially self-complementary RNA molecule is operably linked to a promoter to produce a single transcript. In some embodiments, the sequence encoding the shRNA comprises an inverted repeat joined by a linker polynucleotide sequence to produce the stem and loop structure of the shRNA following transcription.

[0101] In some embodiments, the vector encoding an RNAi construct described herein is a viral vector. Various viral vector systems that are suitable to express the RNAi constructs described herein include, but are not limited to, adenoviral vectors, retroviral vectors (e.g., lentiviral vectors, maloney murine leukemia virus), adeno-associated viral vectors; herpes simplex viral vectors; SV40 vectors; polyoma viral vectors; papilloma viral vectors; picomaviral vectors; and pox viral vectors (e.g., vaccinia virus). In certain embodiments, the viral vector is a retroviral vector (e.g., lentiviral vector).

[0102] Various vectors suitable for use in the present disclosure, methods for inserting nucleic acid sequences encoding siRNA or shRNA molecules into vectors, and methods of delivering the vectors to the cells of interest are known in the art (see, e.g., Dornburg, Gene Therap., Vol. 2: 301-310, 1995; Eglitis, Biotechniques, Vol. 6: 608-614, 1988; Miller, HumGene Therap., Vol. 1: 5-14, 1990; Anderson, Nature, Vol. 392: 25-30, 1998; Rubinson D A et al., Nat. Genet., Vol. 33: 401-406, 2003; Brummelkamp et al., Science, Vol. 296: 550-553, 2002; Brummelkamp et al., Cancer Cell, Vol. 2: 243-247, 2002; Lee et al., Nat Biotechnol, Vol. 20: 500-505, 2002; Miyagishi et al., Nat Biotechnol, Vol. 20: 497-500, 2002; Paddison et al., GenesDev, Vol. 16: 948-958, 2002; Paul et al., Nat Biotechnol, Vol. 20: 505-508, 2002; Sui et al., Proc Natl Acad Sci USA, Vol. 99: 5515-5520, 2002; and Yu et al., Proc Natl Acad Sci USA, Vol. 99: 6047-6052, 2002).

### Compositions

[0103] The disclosure also provides compositions and formulations comprising the RNAi constructs described herein and pharmaceutically acceptable carriers, excipients, or diluents. Such compositions and formulations are useful for reducing expression of PNPLA3 in a subject in need thereof. Where clinical applications are contemplated, pharmaceutical compositions and formulations will be prepared in a form appropriate for the intended application. Generally, this will entail preparing compositions that are essentially free of pyrogens, as well as other impurities that could be harmful to humans or animals.

[0104] The phrases “pharmaceutically acceptable” or “pharmacologically acceptable” refer to molecular entities and compositions that do not produce adverse, allergic, or other untoward reactions when administered to an animal or a human. As used herein, “pharmaceutically acceptable carrier, excipient, or diluent” includes solvents, buffers, solutions, dispersion media, coatings, antibacterial and antifungal agents, isotonic and absorption delaying agents, etc., acceptable for use in formulating pharmaceuticals, such as pharmaceuticals suitable for administration to humans. The use of such media and agents for pharmaceutically active substances is well known in the art. Except insofar as any conventional media or agent is incompatible with the RNAi constructs described herein, its use in therapeutic compositions is contemplated. Supplementary active ingredients also can be incorporated into the compositions, provided they do not inactivate the vectors or RNAi constructs of the compositions.

[0105] Compositions and methods for the formulation of pharmaceutical compositions depend on several criteria, including, but not limited to, route of administration, type and extent of disease or disorder to be treated, and dose to be administered. In some embodiments, the pharmaceutical compositions are formulated based on the intended route of delivery. For instance, in certain embodiments, the pharmaceutical compositions are formulated for parenteral delivery. Parenteral forms of delivery include intravenous, intraarterial, subcutaneous, intrathecal, intraperitoneal, and intramuscular injection or infusion. In one embodiment, the pharmaceutical composition is formulated for intravenous delivery. In such an embodiment, the pharmaceutical composition may include a lipid-based delivery vehicle. In another embodiment, the pharmaceutical composition is formulated for subcutaneous delivery. In such an embodiment, the pharmaceutical composition may include a targeting ligand (e.g., GalNAc-containing ligands described herein).

[0106] In some embodiments, the pharmaceutical compositions comprise an effective amount of an RNAi construct described herein. An “effective amount” is an amount sufficient to produce a beneficial or desired clinical result. In some embodiments, an effective amount is an amount sufficient to reduce PNPLA3 expression in hepatocytes of a subject. In some embodiments, an effective amount may be an amount sufficient to only partially reduce PNPLA3 expression, for example, to a level comparable to expression of the wild-type PNPLA3 allele in human heterozygotes. Human heterozygous carriers of loss of function PNPLA3 variant alleles were reported to have lower serum levels of non-HDL cholesterol and a lower risk of coronary artery disease and myocardial infarction as compared to non-carriers (Nioi et al., New England Journal of Medicine, Vol. 374(22): 2131-2141, 2016). Thus, without being bound by theory, it is believed that partial reduction of PNPLA3 expression may be sufficient to achieve the beneficial reduction of serum non-HDL cholesterol and reduction of risk of coronary artery disease and myocardial infarction.

[0107] An effective amount of an RNAi construct may be from about 0.01 mg/kg body weight to about 100 mg/kg body weight, about 0.05 mg/kg body weight to about 75 mg/kg body weight, about 0.1 mg/kg body weight to about 50 mg/kg body weight, about 1 mg/kg to about 30 mg/kg body weight, about 2.5 mg/kg of body weight to about 20 mg/kg bodyweight, or about 5 mg/kg body weight to about 15 mg/kg body weight. In certain embodiments, a single effective dose of an RNAi construct may be about 0.1 mg/kg, about 0.5 mg/kg, about 1 mg/kg, about 2 mg/kg, about 3 mg/kg, about 4 mg/kg, about 5 mg/kg, about 6 mg/kg, about 7 mg/kg, about 8 mg/kg, about 9 mg/kg, or about 10 mg/kg. The pharmaceutical composition comprising an effective amount of RNAi construct can be administered weekly, biweekly, monthly, quarterly, or biannually. The precise determination of what would be considered an effective amount and frequency of administration may be based on several factors, including a patient's size, age, gender, type of disorder to be treated (e.g., myocardial infarction, heart failure, coronary artery disease, hypercholesterolemia), particular RNAi construct employed, and route of administration. Estimates of effective dosages and in vivo half-lives for any particular RNAi construct described herein can be ascertained using conventional methods and/or testing in appropriate animal models.

[0108] Colloidal dispersion systems, such as macromolecule complexes, nanocapsules, microspheres, beads, and lipid-based systems, including oil-in-water emulsions, micelles, mixed micelles, and liposomes, may be used as delivery vehicles for the RNAi constructs described herein or vectors encoding such constructs. Commercially available fat emulsions that are suitable for delivering the nucleic acids described herein include INTRALIPID®, LIPOSYN®, LIPOSYN® II, LIPOSYN® III, NUTRILIPID, and other similar lipid emulsions. A preferred colloidal system for use as a delivery vehicle in vivo is a liposome (i.e., an artificial membrane vesicle). The RNAi constructs described herein may be encapsulated within liposomes, such as cationic liposomes. Alternatively, RNAi constructs may be complexed to lipids, such as cationic lipids. Suitable lipids and liposomes include neutral (e.g., dioleoylphosphatidyl ethanolamine (DOPE), dimyristoylphosphatidyl choline (DMPC), and dipalmitoyl phosphatidylcholine (DPPC)), distearolyphosphatidyl choline), negative (e.g., dimyristoylphosphatidyl glycerol (DMPG)), and cationic (e.g., dioleoyltetramethylaminopropyl (DOTAP) and dioleoylphosphatidyl ethanolamine (DOTMA)). The preparation and use of such colloidal dispersion systems is well known in the art. Exemplary formulations also are disclosed in, e.g., U.S. Pat. Nos. 5,783,565; 5,837,533; 5,981,505; 6,127,170; 6,217,900; 6,379,965; 6,383,512; 6,747,014; 7,202,227; and WO 03/093449.

[0109] In some embodiments, the RNAi constructs are fully encapsulated in a lipid formulation, e.g., to form a SPLP, pSPLP, SNALP, or other nucleic acid-lipid particle. As used herein, the term “SNALP” refers to a stable nucleic acid-lipid particle, including SPLP. As used herein, the term “SPLP” refers to a nucleic acid-lipid particle comprising plasmid DNA encapsulated within a lipid vesicle. SNALPs and SPLPs typically contain a cationic lipid, a noncationic lipid, and a lipid that prevents aggregation of the particle (e.g., a PEG-lipid conjugate). SNALPs and SPLPs are exceptionally useful for systemic applications, as they exhibit extended circulation lifetimes following intravenous injection and accumulate at distal sites (e.g., sites physically separated from the administration site). SPLPs include “pSPLP,” which include an encapsulated condensing agent-nucleic acid complex as set forth in PCT Publication No. WO 00/03683. The nucleic acid-lipid particles typically have a mean diameter of about 50 nm to about 150 nm, about 60 nm to about 130 nm, about 70 nm to about 110 nm, or about 70 nm to about 90 nm, and are substantially nontoxic. In addition, the nucleic acids present in the nucleic acid-lipid particles desirably are resistant in aqueous solution to degradation with a nuclease. Nucleic acid-lipid particles and their method of preparation are disclosed in, e.g., U.S. Pat. Nos. 5,976,567; 5,981,501; 6,534,484; 6,586,410; and 6,815,432; and PCT Publication No. WO 96/40964.

[0110] Pharmaceutical compositions suitable for injections include, for example, sterile aqueous solutions or dispersions and sterile powders for the extemporaneous preparation of sterile injectable solutions or dispersions. Generally, these preparations are sterile and fluid to the extent that easy injectability exists. Preparations should be stable under the conditions of manufacture and storage and should be preserved against the contaminating action of microorganisms, such as bacteria and fungi. Appropriate solvents or dispersion media may contain, for example, water, ethanol, polyol (for example, glycerol, propylene glycol, liquid polyethylene glycol, and the like), suitable mixtures thereof, and vegetable oils. The proper fluidity can be maintained, for example, by using a coating (such as lecithin), by maintaining the required particle size (in the case of dispersion), and/or by using surfactants. The prevention of the action of microorganisms can be brought about by various antibacterial and antifungal agents, such as, for example, parabens, chlorobutanol, phenol, sorbic acid, thimerosal, and the like. In many cases, isotonic agents (e.g., sugars or sodium chloride) may be included in the composition. Prolonged absorption of the injectable compositions can be brought about by including absorption-delaying agents, such as, for example, aluminum monostearate and gelatin.

[0111] Sterile injectable solutions may be prepared by incorporating an appropriate amount of the RNAi construct (alone or complexed with a ligand) into a solvent along with any other ingredients (such as described above) as desired, followed by filtered sterilization. Generally, dispersions are prepared by incorporating the various sterilized active ingredients into a sterile vehicle which contains the basic dispersion medium and the desired other ingredients. In the case of sterile powders for the preparation of sterile injectable solutions, suitable methods of preparation include vacuum-drying and freeze-drying techniques which yield a powder of the active ingredient(s) plus any additional desired ingredient from a previously sterile-filtered solution thereof.

[0112] The compositions provided herein may be formulated in a neutral or salt form. Pharmaceutically-acceptable salts include, for example, acid addition salts (formed with free amino groups) derived from inorganic acids (e.g., hydrochloric or phosphoric acids), or from organic acids (e.g., acetic, oxalic, tartaric, mandelic, and the like). Salts formed with free carboxyl groups can also be derived from inorganic bases (e.g., sodium, potassium, ammonium, calcium, or ferric hydroxides) or from organic bases (e.g., isopropylamine, trimethylamine, histidine, procaine, and the like).

[0113] For parenteral administration in an aqueous solution, for example, a solution generally is suitably buffered and a liquid diluent is first rendered isotonic with, e.g., sufficient saline or glucose. Such aqueous solutions may be used, for example, for intravenous, intramuscular, subcutaneous, and intraperitoneal administration. Sterile aqueous media desirably are employed as is known to those of skill in the art. By way of illustration, a single dose may be dissolved in 1 ml of isotonic NaCl solution and either added to 1000 ml of hypodermoclysis fluid or injected at the proposed site of infusion, (see for example, “Remington's Pharmaceutical Sciences” 15th Edition, pages 1035-1038 and 1570-1580). For human administration, preparations should meet sterility, pyrogenicity, general safety and purity standards as required by FDA standards. In certain embodiments, a pharmaceutical composition described herein comprises or consists of a sterile saline solution and an RNAi construct described herein. In other embodiments, a pharmaceutical composition described herein comprises or consists of an RNAi construct described herein and sterile water (e.g. water for injection, WFI). In still other embodiments, a pharmaceutical composition described herein comprises or consists of an RNAi construct described herein and phosphate-buffered saline (PBS).

[0114] In some embodiments, the pharmaceutical compositions are packaged with or stored within a device for administration. Devices for injectable formulations include, but are not limited to, injection ports, pre-filled syringes, auto injectors, injection pumps, on-body injectors, and injection pens. Devices for aerosolized or powder formulations include, but are not limited to, inhalers, insufflators, aspirators, and the like. Thus, the present disclosure includes administration devices comprising a pharmaceutical composition described herein for treating or preventing one or more of the disorders described herein.

### Methods for Inhibiting PNPLA3 Expression

[0115] The present disclosure also provides methods of inhibiting expression of a PNPLA3 gene in a cell. The methods include contacting a cell with an RNAi construct, e.g., double-stranded RNAi construct, in an amount effective to inhibit expression of PNPLA3 in the cell, thereby inhibiting expression of PNPLA3 in the cell. Contacting a cell with an RNAi construct, e.g., a double-stranded RNAi construct, may be done in vitro or in vivo. Contacting a cell in vivo with the RNAi construct includes contacting a cell or group of cells within a subject, e.g., a human subject, with the RNAi construct. Combinations of in vitro and in vivo methods of contacting a cell also are within the scope of the present disclosure.

[0116] The present disclosure provides methods for reducing or inhibiting expression of PNPLA3 in a subject in need thereof as well as methods of treating or preventing conditions, diseases, or disorders associated with PNPLA3 expression or activity. A “condition, disease, or disorder associated with PNPLA3 expression” refers to conditions, diseases, or disorders in which PNPLA3 expression levels are altered or where elevated expression levels of PNPLA3 are associated with an increased risk of developing the condition, disease, or disorder.

[0117] Contacting a cell may be direct or indirect, as discussed above. Furthermore, contacting a cell may be accomplished via a targeting ligand, including any ligand described herein or known in the art. In preferred embodiments, the targeting ligand is a carbohydrate moiety, e.g., a GalNAc3 ligand, or any other ligand that directs the RNAi construct to a site of interest.

[0118] In one embodiment, contacting a cell with an RNAi includes “introducing” or “delivering the RNAi into the cell” by facilitating or effecting uptake or absorption into the cell. Absorption or uptake of an RNAi can occur through unaided diffusive or active cellular processes, or by auxiliary agents or devices. For in vivo introduction, for example, RNAi can be injected into a tissue site or administered systemically. In vitro introduction into a cell may be accomplished using methods known in the art, such as electroporation and lipofection. Additional approaches are described herein below and/or are known in the art.

[0119] The term “inhibiting,” as used herein, is used interchangeably with “reducing,” “silencing,” “downregulating”, “suppressing”, and other similar terms, and includes any level of inhibition.

[0120] The phrase “inhibiting expression of a PNPLA3” is intended to refer to inhibition of expression of any PNPLA3 gene (such as, e.g., a mouse PNPLA3 gene, a rat PNPLA3 gene, a monkey PNPLA3 gene, or a human PNPLA3 gene) as well as variants or mutants of a PNPLA3 gene. Thus, the PNPLA3 gene may be a wild-type PNPLA3 gene, a mutant PNPLA3 gene (such as a mutant PNPLA3 gene giving rise to amyloid deposition), or a transgenic PNPLA3 gene in the context of a genetically manipulated cell, group of cells, or organism.

[0121] “Inhibiting expression of a PNPLA3 gene” includes any level of inhibition of a PNPLA3 gene, e.g., at least partial suppression of the expression of a PNPLA3 gene. The expression of the PNPLA3 gene may be assessed based on the level, or the change in the level, of any variable associated with PNPLA3 gene expression, e.g., PNPLA3 mRNA level, PNPLA3 protein level, or the number or extent of amyloid deposits. This level may be assessed in an individual cell or in a group of cells, including, for example, a sample derived from a subject.

[0122] Inhibition may be assessed by a decrease in an absolute or relative level of one or more variables that are associated with PNPLA3 expression compared with a control level. The control level may be any type of control level that is utilized in the art, e.g., a pre-dose baseline level, or a level determined from a similar subject, cell, or sample that is untreated or treated with a control (such as, e.g., buffer only control or inactive agent control). In some embodiments, expression of a PNPLA3 gene is inhibited by at least about 5%, at least about 10%, at least about 15%, at least about 20%, at least about 25%, at least about 30%, at least about 35%, at least about 40%, at least about 45%, at least about 50%, at least about 55%, at least about 60%, at least about 65%, at least about 70%, at least about 75%, at least about 80%, at least about 85%, at least about 90%, at least about 91%, at least about 92%, at least about 93%, at least about 94%, at least about 95%, at least about 96%, at least about 97%, at least about 98%, or at least about 99%.

[0123] Inhibition of the expression of a PNPLA3 gene may be manifested by a reduction of the amount of mRNA expressed by a first cell or group of cells (such cells may be present, for example, in a sample derived from a subject) in which a PNPLA3 gene is transcribed and which has or have been treated (e.g., by contacting the cell or cells with an RNAi construct described herein, or by administering an RNAi construct described herein to a subject in which the cells are or were present), such that the expression of a PNPLA3 gene is inhibited, as compared to a second cell or group of cells substantially identical to the first cell or group of cells but which has not or have not been so treated (control cell(s)). Inhibition may be assessed by expressing the level of mRNA in treated cells as a percentage of the level of mRNA in control cells, using the following formula:

$$\frac{( m R N A in control cells ) - ( m R N A in treated cells )}{m R N A in control cells} \times 100 \%$$

[0124] Alternatively, inhibition of the expression of a PNPLA3 gene may be assessed in terms of a reduction of a parameter that is functionally linked to PNPLA3 gene expression, e.g., PNPLA3 protein expression or Hedgehog pathway protein activities. PNPLA3 gene silencing may be determined in any cell expressing PNPLA3, either endogenously or recombinantly, by any assay known in the art.

[0125] Inhibition of the expression of a PNPLA3 protein may be manifested by a reduction in the level of the PNPLA3 protein that is expressed by a cell or group of cells (e.g., the level of protein expressed in a sample obtained from a subject). As explained above, for the assessment of mRNA suppression, the inhibition of protein expression levels in a treated cell or group of cells may similarly be expressed as a percentage of the level of protein in a control cell or group of cells.

[0126] A control cell or group of cells that may be used to assess the inhibition of the expression of a PNPLA3 gene includes a cell or group of cells that has not yet been contacted with an RNAi construct described herein. For example, the control cell or group of cells may be derived from an individual subject (e.g., a human or animal subject) prior to treatment of the subject with an RNAi construct.

[0127] The level of PNPLA3 mRNA that is expressed by a cell or group of cells, or the level of circulating PNPLA3 mRNA, may be determined using any method known in the art for assessing mRNA expression, such as those mentioned above. In some embodiments, the level of expression of PNPLA3 in a sample is determined by detecting a transcribed polynucleotide, or portion thereof, e.g., mRNA of the PNPLA3 gene. In this regard, for example, RNA may be extracted from cells using RNA extraction techniques including, for example, acid phenol/guanidine isothiocyanate extraction (RNAzol B; Biogenesis), RNeasy RNA preparation kits (Qiagen), or PAXgene (PreAnalytix, Switzerland). Typical assay formats utilizing ribonucleic acid hybridization include nuclear run-on assays, RT-PCR, RNase protection assays (Melton et al., Nuc. Acids Res., 12:7035), northern blotting, in situ hybridization, and microarray analysis. Circulating PNPLA3 mRNA may be detected using methods described in WO 2012/177906.

[0128] In one embodiment, the level of expression of PNPLA3 is determined using a nucleic acid probe. The term “probe,” as used herein, refers to any molecule that is capable of selectively binding to a specific PNPLA3 sequence. Probes can be synthesized by one of skill in the art or derived from appropriate biological preparations. Probes may be specifically designed to be labeled. Examples of molecules that can be utilized as probes include, but are not limited to, RNA, DNA, proteins, antibodies, and organic molecules.

[0129] Isolated mRNA can be used in hybridization or amplification assays that include, but are not limited to, Southern or northern analyses, polymerase chain reaction (PCR) analyses, and probe arrays. One method for the determination of mRNA levels involves contacting isolated mRNA with a nucleic acid molecule (probe) that can hybridize to PNPLA3 mRNA. In one embodiment, the mRNA is immobilized on a solid surface and contacted with a probe, for example by running the isolated mRNA on an agarose gel and transferring the mRNA from the gel to a membrane, such as nitrocellulose. In an alternative embodiment, the probe(s) are immobilized on a solid surface and the mRNA is contacted with the probe(s), for example, in an Affymetrix gene chip array. A skilled artisan can readily adapt known mRNA detection methods for use in determining the level of PNPLA3 mRNA.

[0130] An alternative method for determining the level of expression of PNPLA3 in a sample involves the process of nucleic acid amplification and/or reverse transcriptase (to prepare cDNA) of for example mRNA in the sample, e.g., by RT-PCR (see, e.g., U.S. Pat. No. 4,683,202), ligase chain reaction (Barany (1991) Proc. Natl. Acad. Sci. USA 88: 189-193), self-sustained sequence replication (Guatelli et al. (1990) Proc. Natl. Acad. Sci. USA 87: 1874-1878), transcriptional amplification system (Kwoh et al. (1989) Proc. Natl. Acad. Sci. USA 86: 1173-1177), Q-Beta Replicase (Lizardi et al. (1988) Bio/Technology 6: 1197), rolling circle replication (Lizardi et al., supra; and U.S. Pat. No. 5,854,033) or any other nucleic acid amplification method, followed by the detection of the amplified molecules using techniques well known to those of skill in the art. These detection schemes are especially useful for the detection of nucleic acid molecules if such molecules are present in very low numbers. In some aspects of the disclosure, the level of expression of PNPLA3 may be determined by quantitative fluorogenic RT-PCR {i.e., the TAQMAN™ System). The expression levels of PNPLA3 mRNA may be monitored using a membrane blot (such as used in hybridization analysis such as northern, Southern, dot, and the like), or microwells, sample tubes, gels, beads or fibers (or any solid support comprising bound nucleic acids) (see, e.g., U.S. Pat. Nos. 5,445,934; 5,677,195; 5,770,722; 5,744,305; and 5,874,219). The determination of PNPLA3 expression level may also comprise using nucleic acid probes in solution. In certain embodiments, the level of mRNA expression is assessed using branched DNA (bDNA) assays or real time PCR (qPCR).

[0131] The level of PNPLA3 protein expression may be determined using any method known in the art for the measurement of protein levels. Such methods include, for example, electrophoresis, capillary electrophoresis, high performance liquid chromatography (HPLC), thin layer chromatography (TLC), hyperdiffusion chromatography, fluid or gel precipitin reactions, absorption spectroscopy, colorimetric assays, spectrophotometric assays, flow cytometry, immunodiffusion (single or double), immunoelectrophoresis, Western blotting, radioimmunoassay (RIA), enzyme-linked immunosorbent assays (ELISAs), immunofluorescent assays, electrochemiluminescence assays, etc.

[0132] In some embodiments, the efficacy of the methods described herein can be monitored by detecting or monitoring a reduction in a symptom of a PNPLA3 disease, such as reduction in edema swelling of the extremities, face, larynx, upper respiratory tract, abdomen, trunk, and genitals, prodrome; laryngeal swelling; nonpruritic rash; nausea; vomiting; or abdominal pain. These symptoms may be assessed in vitro or in vivo using any method known in the art.

[0133] In some embodiments, the RNAi construct or a composition comprising the RNAi construct is administered to a subject such that the RNAi construct is delivered to a specific site within the subject. The inhibition of expression of PNPLA3 may be assessed using measurements of the level or change in the level of PNPLA3 mRNA or PNPLA3 protein in a sample derived from fluid or tissue from the specific site within the subject. In some embodiments, the RNAi construct may be delivered to a site such as the liver, choroid plexus, retina, and pancreas. The site may also be a subsection or subgroup of cells from any one of the aforementioned sites. The site may also include cells that express a particular type of receptor.

### Methods of Treating or Preventing PNPLA3-Associated Diseases

[0134] The present disclosure provides therapeutic and prophylactic methods which include administering to a subject with a PNPLA3-associated disease, disorder, and/or condition, or prone to developing, a PNPLA3-associated disease, disorder, and/or condition, an RNAi construct, compositions (e.g., pharmaceutical compositions) comprising an RNAi construct, or vectors comprising an RNAi construct as described herein. Non-limiting examples of PNPLA3-associated diseases include, for example, fatty liver (steatosis), nonalcoholic steatohepatitis (NASH), cirrhosis of the liver, accumulation of fat in the liver, inflammation of the liver, hepatocellular necrosis, liver fibrosis, obesity, and nonalcoholic fatty liver disease (NAFLD). In one embodiment, the PNPLA3-associated disease is NAFLD. In another embodiment, the PNPLA3-associated disease is NASH. In another embodiment, the PNPLA3-associated disease is fatty liver (steatosis). In another embodiment, the PNPLA3-associated disease is insulin resistance. In another embodiment, the PNPLA3-associated disease is not insulin resistance.

[0135] In certain embodiments, the present disclosure provides a method for reducing the expression of PNPLA3 in a patient in need thereof comprising administering to the patient any of the RNAi constructs described herein. The term “patient,” as used herein, refers to a mammal, including humans, and can be used interchangeably with the term “subject.” The expression level of PNPLA3 in hepatocytes in the patient desirably is reduced following administration of the RNAi construct as compared to the PNPLA3 expression level in a patient not receiving the RNAi construct.

[0136] The methods described herein are useful for treating a subject having a PNPLA3-associated disease, e.g., a subject that would benefit from reduction in PNPLA3 gene expression and/or PNPLA3 protein production. In one aspect, the present disclosure provides methods of reducing the level of Patatin-Like Phospholipase Domain Containing 3 (PNPLA3) gene expression in a subject having nonalcoholic fatty liver disease (NAFLD). In another aspect, the present disclosure provides methods of reducing the level of PNPLA3 protein in a subject with NAFLD. The present disclosure also provides methods of reducing the level of activity of the hedgehog pathway in a subject with NAFLD.

[0137] The treatment methods (and uses) described herein include administering to the subject, e.g., a human, a therapeutically effective amount of the disclosed RNAi construct targeting a PNPLA3 gene, a pharmaceutical composition comprising the RNAi construct, or a vector comprising the RNAi construct.

[0138] In one aspect, the disclosure provides methods of preventing at least one symptom in a subject having NAFLD, e.g., the presence of elevated hedgehog signaling pathways, fatigue, weakness, weight loss, loss of apetite, nausea, abdominal pain, spider-like blood vessels, yellowing of the skin and eyes (jaundice), itching, fluid buildup and swelling of the legs (edema), abdomen swelling (ascites), and mental confusion. The methods include administering to the subject a prophylactically effective amount of the RNAi construct, e.g., dsRNA, pharmaceutical compositions comprising the RNAi construct, or vectors encoding the RNAi construct, thereby preventing at least one symptom in the subject having a disorder that would benefit from reduction in PNPLA3 gene expression. A “prophylactically effective amount” refers to an amount effective, at dosages and for periods of time necessary, to achieve a desired prophylactic result (e.g., prevention of disease onset).

[0139] In another aspect, the present disclosure provides uses of a therapeutically effective amount of an RNAi construct described herein for treating a subject, e.g., a subject that would benefit from a reduction and/or inhibition of PNPLA3 gene expression. In a further aspect, the present disclosure provides uses of an RNAi construct, e.g., a dsRNA, targeting an PNPLA3 gene or pharmaceutical composition comprising an RNAi construct targeting an PNPLA3 gene in the manufacture of a medicament for treating a subject, e.g., a subject that would benefit from a reduction and/or inhibition of PNPLA3 gene expression and/or PNPLA3 protein production, such as a subject having a disorder that would benefit from reduction in PNPLA3 gene expression, e.g., a PNPLA3-associated disease.

[0140] The disclosure provides uses of an RNAi construct, e.g., a dsRNA, for preventing at least one symptom in a subject suffering from a disorder that would benefit from a reduction and/or inhibition of PNPLA3 gene expression and/or PNPLA3 protein production. For example, the disclosure provides uses of the RNAi construct described herein, compositions comprising same, and vectors comprising same, in the treatment of NAFLD.

[0141] In a further aspect, the present invention provides uses of the disclosed RNAi construct, compositions comprising same, or a vector comprising same, in the manufacture of a medicament for preventing at least one symptom in a subject suffering from a disorder that would benefit from a reduction and/or inhibition of PNPLA3 gene expression and/or PNPLA3 protein production, such as a PNPLA3-associated disease.

[0142] In one embodiment, an RNAi construct targeting PNPLA3 is administered to a subject having a PNPLA3-associated disease, e.g., nonalcoholic fatty liver disease (NAFLD), such that the expression of a PNPLA3 gene, e.g., in a cell, tissue, blood or other tissue or fluid of the subject are reduced by at least about 10%, 11%, 12%, 13%, 14%, 15%, 16%, 17%, 18%, 19%, 20%, 21%, 22%, 23%, 24%, 25%, 26%, 27%, 28%, 29%, 30%, 31%, 32%, 33%, 34%, 35%, 36%, 37%, 38%, 39%, 40%, 41%, 42%, 43%, 44%, 45%, 46%, 47%, 48%, 49%, 50%, 51%, 52%, 53%, 54%, 55%, 56%, 57%, 58%, 59%, 60%, 61%, 62%, 62%, 64%, 65%, 66%, 67%, 68%, 69%, 70%, 71%, 72%, 73%, 74%, 75%, 76%, 77%, 78%, 79%, 80%, 81%, 82%, 83%, 84%, 85%, 86%, 87%, 88%, 89%, 90%, 91%, 92%, 93%, 94%, 95%, 96%, 97%, 98%, or at least about 99% or more when the RNAi construct is administered to the subject.

[0143] The methods and uses provided herein include administering a composition described herein such that expression of the target PNPLA3 gene is decreased for any suitable amount of time, such as for about 1, 2, 3, 4 5, 6, 7, 8, 12, 16, 18, 24, 28, 32, 36, 40, 44, 48, 52, 56, 60, 64, 68, 72, 76, or about 80 hours. In one embodiment, expression of the target PNPLA3 gene is decreased for an extended duration, e.g., at least about two, three, four, five, six, seven days or more, e.g., about one week, two weeks, three weeks, or about four weeks or longer.

[0144] Administration of the RNAi construct according to the methods and uses of the described herein may result in a reduction of the severity, signs, symptoms, and/or markers of such diseases or disorders in a patient with a PNPLA3-associated disease, e.g., NAFLD. By “reduction” in this context is meant a statistically significant decrease in such level. The reduction can be, for example, at least about 5%, 1%, 15%, 20%, 25%, 30%, 35%, 40%, 45%, 50%, 55%, 60%, 65%, 70%, 75%, 80%, 85%, 90%, 95%, or about 100%. Efficacy of treatment or prevention of disease can be assessed, for example by measuring disease progression, disease remission, symptom severity, reduction in pain, quality of life, dose of a medication required to sustain a treatment effect, level of a disease marker or any other measurable parameter appropriate for a given disease being treated or targeted for prevention. It is well within the ability of one skilled in the art to monitor efficacy of treatment or prevention by measuring any one of such parameters, or any combination of parameters. For example, efficacy of treatment of NAFLD may be assessed, for example, by periodic monitoring of NAFLD symptoms, liver fat levels, or expression of downstream genes. Comparison of the later readings with the initial readings provide a physician an indication of whether the treatment is effective. It is well within the ability of one skilled in the art to monitor efficacy of treatment or prevention by measuring any one of such parameters, or any combination of parameters. In connection with the administration of an RNAi targeting PNPLA3 or pharmaceutical composition thereof, “effective against” an PNPLA3-associated disease indicates that administration in a clinically appropriate manner results in a beneficial effect for at least a statistically significant fraction of patients, such as improvement of symptoms, a cure, a reduction in disease, extension of life, improvement in quality of life, or other effect generally recognized as positive by medical doctors familiar with treating NAFLD and/or an PNPLA3-associated disease and the related causes.

[0145] A treatment or preventive effect is evident when there is a statistically significant improvement in one or more parameters of disease status, or by a failure to worsen or to develop symptoms where they would otherwise be anticipated. As an example, a favorable change of at least 10% in a measurable parameter of disease, and preferably at least 20%, 30%, 40%, 50% or more can be indicative of effective treatment. Efficacy for a given RNAi drug or formulation of that drug can also be judged using an experimental animal model for the given disease as known in the art. When using an experimental animal model, efficacy of treatment is evidenced when a statistically significant reduction in a marker or symptom is observed.

[0146] Subjects can be administered any therapeutically effective amount of the RNAi construct. Exemplary therapeutically effective amounts of the RNAi construct include, but are not limited to, 0.01 mg/kg, 0.02 mg/kg, 0.03 mg/kg, 0.04 mg/kg, 0.05 mg/kg, 0.1 mg/kg, 0.15 mg/kg, 0.2 mg/kg, 0.25 mg/kg, 0.3 mg/kg, 0.35 mg/kg, 0.4 mg/kg, 0.45 mg/kg, 0.5 mg/kg, 0.55 mg/kg, 0.6 mg/kg, 0.65 mg/kg, 0.7 mg/kg, 0.75 mg/kg, 0.8 mg/kg, 0.85 mg/kg, 0.9 mg/kg, 0.95 mg/kg, 1.0 mg/kg, 1.1 mg/kg, 1.2 mg/kg, 1.3 mg/kg, 1.4 mg/kg, 1.5 mg/kg, 1.6 mg/kg, 1.7 mg/kg, 1.8 mg/kg, 1.9 mg/kg, 2.0 mg/kg, 2.1 mg/kg, 2.2 mg/kg, 2.3 mg/kg, 2.4 mg/kg, 2.5 mg/kg, 2.6 mg/kg, 2.7 mg/kg, 2.8 mg/kg, 2.9 mg/kg, 3.0 mg/kg, 3.1 mg/kg, 3.2 mg/kg, 3.3 mg/kg, 3.4 mg/kg, 3.5 mg/kg, 3.6 mg/kg, 3.7 mg/kg, 3.8 mg/kg, 3.9 mg/kg, 4.0 mg/kg, 4.1 mg/kg, 4.2 mg/kg, 4.3 mg/kg, 4.4 mg/kg, 4.5 mg/kg, 4.6 mg/kg, 4.7 mg/kg, 4.8 mg/kg, 4.9 mg/kg, 5.0 mg/kg, 5.1 mg/kg, 5.2 mg/kg, 5.3 mg/kg, 5.4 mg/kg, 5.5 mg/kg, 5.6 mg/kg, 5.7 mg/kg, 5.8 mg/kg dsRNA, 5.9 mg/kg, 6.0 mg/kg, 6.1 mg/kg, 6.2 mg/kg, 6.3 mg/kg, 6.4 mg/kg, 6.5 mg/kg, 6.6 mg/kg, 6.7 mg/kg, 6.8 mg/kg, 6.9 mg/kg, 7.0 mg/kg, 7.1 mg/kg, 7.2 mg/kg, 7.3 mg/kg, 7.4 mg/kg, 7.5 mg/kg, 7.6 mg/kg, 7.7 mg/kg, 7.8 mg/kg, 7.9 mg/kg, 8.0 mg/kg, 8.1 mg/kg, 8.2 mg/kg, 8.3 mg/kg, 8.4 mg/kg, 8.5 mg/kg, 8.6 mg/kg, 8.7 mg/kg, 8.8 mg/kg, 8.9 mg/kg, 9.0 mg/kg, 9.1 mg/kg, 9.2 mg/kg, 9.3 mg/kg, 9.4 mg/kg, 9.5 mg/kg, 9.6 mg/kg, 9.7 mg/kg, 9.8 mg/kg, 9.9 mg/kg, 9.0 mg/kg, 10 mg/kg, 15 mg/kg, 20 mg/kg, 25 mg/kg, 30 mg/kg, 35 mg/kg, 40 mg/kg, 45 mg/kg, or about 50 mg/kg. In one embodiment, subjects can be administered 0.5 mg/kg of the RNAi construct. Values and ranges intermediate to the recited values also are encompassed by the present disclosure.

[0147] Administration of the RNAi construct, or a composition comprising same, can reduce the presence of PNPLA3 protein levels, e.g., in a cell, tissue, blood, urine or other compartment of the patient by at least about 5%, 6%, 7%, 8%, 9%, 10%, 11%, 12%, 13%, 14%, 15%, 16%, 17%, 18%, 19%, 20%, 21%, 22%, 23%, 24%, 25%, 26%, 27%, 28%, 29%, 30%, 31%, 32%, 33%, 34%, 35%, 36%, 37%, 38%, 39%, 40%, 41%, 42%, 43%, 44%, 45%, 46%, 47%, 48%, 49%, 50%, 51%, 52%, 53%, 54%, 55%, 56%, 57%, 58%, 59%, 60%, 61%, 62%, 63%, 64%, 65%, 66%, 67%, 68%, 69%, 70%, 71%, 72%, 73%, 74%, 75%, 76%, 77%, 78%, 79%, 80%, 81%, 82%, 83%, 84%, 85%, 86%, 87%, 88%, 89%, 90%, 91%, 92%, 93%, 94%, 95%, 96%, 97%, 98%, or at least about 99% or more.

[0148] Before administration of a full dose of the RNAi, patients can be administered a smaller dose, such as a 5% infusion, and monitored for adverse effects, such as an allergic reaction. In another example, the patient can be monitored for unwanted immunostimulatory effects, such as increased cytokine (e.g., TNF-alpha or INF-alpha) levels.

[0149] Owing to the inhibitory effects on PNPLA3 expression, a composition according to the disclosure or a pharmaceutical composition prepared therefrom can enhance the quality of life.

[0150] An RNAi described herein may be administered in “naked” form, where the modified or unmodified RNAi construct is directly suspended in aqueous or suitable buffer solvent, as a “free RNAi.” A free RNAi is administered in the absence of a pharmaceutical composition. The free RNAi may be in a suitable buffer solution. The buffer solution may comprise acetate, citrate, prolamine, carbonate, or phosphate, or any combination thereof. In one embodiment, the buffer solution is phosphate buffered saline (PBS). The pH and osmolality of the buffer solution containing the RNAi can be adjusted such that it is suitable for administering to a subject.

[0151] Alternatively, an RNAi described herein may be administered as a pharmaceutical composition, such as a dsRNA liposomal formulation.

[0152] Subjects that would benefit from a reduction and/or inhibition of PNPLA3 gene expression are those having nonalcoholic fatty liver disease (NAFLD) and/or an PNPLA3-associated disease or disorder as described herein.

[0153] Treatment of a subject that would benefit from a reduction and/or inhibition of PNPLA3 gene expression includes therapeutic and prophylactic treatment.

[0154] The disclosure further provides methods and uses of an RNAi construct or a pharmaceutical composition thereof for treating a subject that would benefit from reduction and/or inhibition of PNPLA3 gene expression, e.g., a subject having a PNPLA3-associated disease, in combination with other pharmaceuticals and/or other therapeutic methods, e.g., with known pharmaceuticals and/or known therapeutic methods, such as, for example, those which are currently employed for treating these disorders.

[0155] For example, in certain embodiments, an RNAi targeting a PNPLA3 gene is administered in combination with, e.g., an agent useful in treating an PNPLA3-associated disease. For example, additional therapeutics and therapeutic methods suitable for treating a subject that would benefit from reduction in PNPLA3 expression, e.g., a subject having a PNPLA3-associated disease, include an RNAi construct targeting a different portion of the PNPLA3 gene, a therapeutic agent, and/or procedures for treating a PNPLA3-associated disease or a combination of any of the foregoing.

[0156] In certain embodiments, a first RNAi construct targeting a PNPLA3 gene is administered in combination with a second RNAi construct targeting a different portion of the PNPLA3 gene. For example, the first RNAi construct may comprise a first sense strand and a first antisense strand forming a double stranded region, wherein substantially all of the nucleotides of said first sense strand and substantially all of the nucleotides of the first antisense strand are modified nucleotides, wherein said first sense strand is conjugated to a ligand attached at the 3′-terminus, and wherein the ligand is one or more GalNAc derivatives attached through a bivalent or trivalent branched linker; and the second RNAi construct may comprise a second sense strand and a second antisense strand forming a double stranded region, wherein substantially all of the nucleotides of the second sense strand and substantially all of the nucleotides of the second antisense strand are modified nucleotides, wherein the second sense strand is conjugated to a ligand attached at the 3′-terminus, and wherein the ligand is one or more GalNAc derivatives attached through a bivalent or trivalent branched linker. In one embodiment, all of the nucleotides of the first and second sense strand and/or all of the nucleotides of the first and second antisense strand comprise a modification. The modified nucleotides may be any one or combination of the modified nucleotides described herein.

[0157] In other embodiments, a first RNAi construct targeting a PNPLA3 gene is administered in combination with a second RNAi construct targeting a gene that is different from the PNPLA3 gene. For example, the RNAi construct targeting the PNPLA3 gene may be administered in combination with an RNAi construct targeting the SCAP gene. SCAP (SREBP Cleavage Activating Protein) is the only known regulator of the transcription factors of the SREBP family. The SREBP (Sterol Response Element Binding Protein) family play important roles in regulating de novo lipogenesis and triglyceride (TG) accumulation within the liver. The first RNAi construct targeting a PNPLA3 gene and the second RNAi construct targeting a different gene, e.g., the SCAP gene, may be administered as parts of the same pharmaceutical composition. Alternatively, the first RNAi construct targeting a PNPLA3 gene and the second RNAi construct targeting a different gene, e.g., the SCAP gene, may be administered as parts of different pharmaceutical compositions.

[0158] The RNAi construct and an additional therapeutic agent and/or treatment may be administered at the same time and/or in the same combination, e.g., parenterally, or the additional therapeutic agent can be administered as part of a separate composition or at separate times and/or by another method known in the art or described herein.

[0159] The present disclosure also provides methods of using an RNAi construct and/or a composition containing an RNAi construct to reduce and/or inhibit PNPLA3 expression (gene or protein expression) in a cell. In yet other aspects, use of an RNAi construct and/or a composition comprising an RNAi construct for the manufacture of a medicament for reducing and/or inhibiting PNPLA3 gene expression in a cell are provided. In still other aspects, the present disclosure provides an RNAi described herein and/or a composition comprising an RNAi construct described herein for use in reducing and/or inhibiting PNPLA3 protein production in a cell. In yet other aspects, use of an RNAi construct and/or a composition comprising an RNAi construct for the manufacture of a medicament for reducing and/or inhibiting PNPLA3 protein production in a cell are provided. The methods and uses include contacting the cell with an RNAi construct, e.g., a dsRNA, and maintaining the cell for a time sufficient to obtain degradation of the mRNA transcript of a PNPLA3 gene, thereby inhibiting expression of the PNPLA3 gene or inhibiting PNPLA3 protein production in the cell. Reduction in gene expression can be assessed by any methods known in the art or described herein for determining mRNA or protein levels.

[0160] In the methods and uses described herein, the cell may be contacted in vitro or in vivo, i.e., the cell may be outside (e.g., in cell culture) or within a subject. A cell suitable for treatment using the methods described herein may be any cell that expresses an PNPLA3 gene, e.g., a cell from a subject having NAFLD or a cell comprising an expression vector comprising a PNPLA3 gene or portion of a PNPLA3 gene. A suitable cell for use in the disclosed methods includes, for example, a mammalian cell, e.g., a primate cell (such as a human cell or a non-human primate cell, e.g., a monkey cell or a chimpanzee cell), a non-primate cell (such as a cow cell, a pig cell, a camel cell, a llama cell, a horse cell, a goat cell, a rabbit cell, a sheep cell, a hamster, a guinea pig cell, a cat cell, a dog cell, a rat cell, a mouse cell, a lion cell, a tiger cell, a bear cell, or a buffalo cell), a bird cell (e.g., a duck cell or a goose cell), or a whale cell. In one embodiment, the cell is a human cell.

[0161] PNPLA3 gene expression may be inhibited in the cell by at least about 5%, 6%, 7%, 8%, 9%, 10%, 11%, 12%, 13%, 14%, 15%, 16%, 17%, 18%, 19%, 20%, 21%, 22%, 23%, 24%, 25%, 26%, 27%, 28%, 29%, 30%, 31%, 32%, 33%, 34%, 35%, 36%, 37%, 38%, 39%, 40%, 41%, 42%, 43%, 44%, 45%, 46%, 47%, 48%, 49%, 50%, 51%, 52%, 53%, 54%, 55%, 56%, 57%, 58%, 59%, 60%, 61%, 62%, 63%, 64%, 65%, 66%, 67%, 68%, 69%, 70%, 71%, 72%, 73%, 74%, 75%, 76%, 77%, 78%, 79%, 80%, 81%, 82%, 83%, 84%, 85%, 86%, 87%, 88%, 89%, 90%, 91%, 92%, 93%, 94%, 95%, 96%, 97%, 98%, 99%, or about 100%.

[0162] PNPLA3 protein production may be inhibited in the cell by at least about 5%, 6%, 7%, 8%, 9%, 10%, 11%, 12%, 13%, 14%, 15, 16%, 17%, 18%, 19%, 20%, 21%, 22%, 23%, 24%, 25%, 26%, 27%, 28%, 29%, 30%, 31%, 32%, 33%, 34%, 35%, 36%, 37%, 38%, 39%, 40%, 41%, 42%, 43%, 44%, 45%, 46%, 47%, 48%, 49%, 50%, 51%, 52%, 53%, 54%, 55%, 56%, 57%, 58%, 59%, 60%, 61%, 62%, 63%, 64%, 65%, 66%, 67%, 68%, 69%, 70%, 71%, 72%, 73%, 74%, 75%, 76%, 77%, 78%, 79%, 80%, 81%, 82%, 83%, 84%, 85%, 86%, 87%, 88%, 89%, 90%, 91%, 92%, 93%, 94%, 95%, 96%, 97%, 98%, 99%, or about 100%.

[0163] The in vivo methods and uses described herein may include administering to a subject a composition containing an RNAi construct, where the RNAi construct includes a nucleotide sequence that is complementary to at least a part of an RNA transcript of the PNPLA3 gene of the subject. When the organism to be treated is a human, the composition can be administered by any means known in the art including, but not limited to subcutaneous, intravenous, oral, intraperitoneal, or parenteral routes, including intracranial (e.g., intraventricular, intraparenchymal, and intrathecal), intramuscular, transdermal, airway (aerosol), nasal, rectal, and topical (including buccal and sublingual) administration. In certain embodiments, the compositions are administered by subcutaneous or intravenous infusion or injection. In one embodiment, the compositions are administered by subcutaneous injection.

[0164] In some embodiments, the administration is via a depot injection. A depot injection may release the RNAi construct in a consistent way over a prolonged time period. Thus, a depot injection may reduce the frequency of dosing needed to obtain a desired effect, e.g., a desired inhibition of PNPLA3, or a therapeutic or prophylactic effect. A depot injection may also provide more consistent serum concentrations. Depot injections may include subcutaneous injections or intramuscular injections. In some embodiments, the depot injection is a subcutaneous injection.

[0165] In some embodiments, the administration is via a pump. The pump may be an external pump or a surgically implanted pump. In certain embodiments, the pump is a subcutaneously implanted osmotic pump. In other embodiments, the pump is an infusion pump. An infusion pump may be used for intravenous, subcutaneous, arterial, or epidural infusions. In preferred embodiments, the infusion pump is a subcutaneous infusion pump. In other embodiments, the pump is a surgically implanted pump that delivers the RNAi to the subject.

[0166] The mode of administration may be chosen based upon whether local or systemic treatment is desired and based upon the area to be treated. The route and site of administration may be chosen to enhance targeting.

[0167] The methods and uses include administering to the mammal, e.g., a human, a composition comprising an RNAi construct, e.g., an siRNA, that targets an PNPLA3 gene in a cell of the mammal and maintaining the mammal for a time sufficient to obtain degradation of the mRNA transcript of the PNPLA3 gene, thereby inhibiting expression of the PNPLA3 gene in the mammal. Reduction in gene expression and/or protein expression can be assessed in a sample obtained from the RNAi construct-administered subject by any method known in the art or described herein. In one embodiment, a tissue sample serves as the tissue material for monitoring the reduction in PNPLA3 gene and/or protein expression. In another embodiment, a blood sample serves as the tissue material for monitoring the reduction in PNPLA3 gene and/or protein expression.

[0168] In some embodiments, verification of RISC-mediated cleavage of a target mRNA (e.g., PNPLA3 mRNA) in vivo following administration of an RNAi construct may be assessed by performing 5′-RACE or modifications of the protocol as known in the art (Lasham A et al., (2010) Nucleic Acid Res., 38 (3) p-el9; and Zimmermann et al. (2006) Nature 441: 111-4).

[0169] It is understood that all ribonucleic acid sequences disclosed herein can be converted to deoxyribonucleic acid sequences by substituting a thymine base for a uracil base in the sequence. Likewise, all deoxyribonucleic acid sequences disclosed herein can be converted to ribonucleic acid sequences by substituting a uracil base for a thymine base in the sequence. Deoxyribonucleic acid sequences, ribonucleic acid sequences, and sequences containing mixtures of deoxyribonucleotides and ribonucleotides of all sequences disclosed herein are encompassed by the present disclosure.

[0170] Additionally, any nucleic acid sequences disclosed herein may be modified with any combination of chemical modifications. One of skill in the art will readily appreciate that such designation as “RNA” or “DNA” to describe modified polynucleotides is, in certain instances, arbitrary. For example, a polynucleotide comprising a nucleotide having a 2′-OH substituent on the ribose sugar and a thymine base could be described as a DNA molecule having a modified sugar (2′-OH for the natural 2′-H of DNA) or as an RNA molecule having a modified base (thymine (methylated uracil) for natural uracil of RNA).

[0171] Accordingly, nucleic acid sequences provided herein, including but not limited to those set forth in the sequence listing, are intended to encompass nucleic acids containing any combination of natural or modified RNA and/or DNA, including, but not limited to, such nucleic acids having modified nucleobases. By way of a further example and without limitation, a polynucleotide having the sequence “ATCGATCG” (encompasses any polynucleotides having such a sequence, whether modified or unmodified, including, but not limited to, such compounds comprising RNA bases, such as those having sequence “AUCGAUCG” and those having some DNA bases and some RNA bases such as “AUCGATCG,” and polynucleotides having other modified bases, such as “ATmeCGAUCG,” wherein meC indicates a cytosine base comprising a methyl group at the 5-position.

[0172] The following examples, including the experiments conducted and the results achieved, are provided for illustrative purposes only and are not to be construed as limiting the scope of the appended claims.

### EXAMPLES

[0173] All animal experiments described herein were approved by the Institutional Animal Care and Use Committee (IACUC) of Amgen and cared for in accordance to the Guide for the Care and Use of Laboratory Animals, 8th Edition (National Research Council (U.S.)). Committee for the Update of the Guide for the Care and Use of Laboratory Animals, Institute for Laboratory Animal Research (U.S.), and National Academies Press (U.S.) (2011) Guide for the care and use of laboratory animals. 8th Ed., National Academies Press, Washington, D.C. Mice were single-housed in an air-conditioned room at 22±2° C. with a twelve-hour light; twelve-hour darkness cycle (0600-1800 hours). Animals had ad libitum access to a regular chow diet (Envigo, 2920X, or a diet as stated otherwise) and to water (reverse osmosis-purified) via automatic watering system, unless otherwise indicated. At termination, blood was collected by cardiac puncture under deep anesthesia, and then, following Association for Assessment and Accreditation of Laboratory Animal Care (AAALAC) guidelines, euthanized by a secondary physical method.

### Example 1: Selection, Design and Synthesis of Modified PNPLA3 siRNA Molecules

[0174] The identification and selection of optimal sequences for therapeutic siRNA molecules targeting patatin-like phospholipase domain-containing 3 (PNPLA3) were identified using bioinformatics analysis of a human PNPLA3 transcript (GenBank Accession No. NM_025225.2). The bioinformatics analysis identified more than 450 suitable human/cynomolgus triggers across the entire PNPLA3 transcript and revealed an extended 3′UTR of approximately 4,500 bp that has yet to be explored. Table 1 lists PNPLA3 mRNA target sequences identified as having therapeutic properties.

[0175] More than 600 siRNA molecules directed against the sequences listed in Table 1 were synthesized, and these sequences were modified to include a single chemical modification to improve the potency and in vivo stability of PNPLA3 siRNA sequences. The sense and antisense sequences for each of the unmodified and modified PNPLA3 siRNAs are shown in FIG. 1 and FIG. 2.

[0176] A panel of 194 siRNA molecules (or “triggers”) selective for human and cynomolgus (human/cyno) PNPLA3 spanning the coding region (CDR) and annotated 3′UTR were generated, along with an additional 162 human/cyno triggers targeting the extended 3′UTR and 64 human/marmoset triggers. Human-only triggers targeting the coding region also were prepared.

### Example 2: Efficacy of Select PNPLA3 siRNA Molecules in RNA FISH Assay

[0177] siRNA molecules synthesized in Example 1 with a single modification pattern (shown in FIG. 1) were screened in an in vitro siRNA transfection assay followed by a fluorescent in situ hybridization assay targeting ribonucleic acid molecules (RNA FISH) to determine IC₅₀ and maximum activity values. HepG2 cells (purchased from ATCC) were cultured in minimal essential medium EMEM from ATCC supplemented with 10% fetal bovine serum (FBS, Sigma) and 1% penicillin-streptomycin (P-S, Corning).

[0178] The siRNA transfection was performed as follows: 1 μL of test siRNAs and 4 μL of plain EMEM were added to PDL-coated CellCarrier-384 Ultra assay plates (PerkinElmer) by Bravo Automated Liquid Handling (Agilent). 5 μL of Lipofectamine RNAiMAX (Thermo Fisher Scientific), pre-diluted in EMEM (specifically 0.06 μL of RNAiMAX in 5 μL EMEM), was then dispensed into the assay plates by Multidrop Combi Reagent Dispenser (Thermo Fisher Scientific). After a 20 minute incubation of the siRNA/RNAiMAX mixture at room temperature (RT), 30 μL of HepG2 cells (2000 cells per well) in EMEM supplemented with 10% FBS and 1% P-S were added to the transfection complex using Multidrop Combi Reagent Dispenser. The assay plates were incubated for 20 minutes at RT prior to being placed in an incubator. Cells were then incubated for 72 hours at 37° C. and 5% CO2.

[0179] The RNA FISH assay was performed using the Affymetrix QUANTIGENE® View RNA HC Screening Assay kit (QVP0011), the Affymetrix View HC Signal Amplification Kit 3-plex (QVP0213), and Affymetrix gene specific probes: Human PNPLA3 (VA6-20279-01) and Human PPIB (VA1-10148-01), following the manufacturer's protocol using an in-house assembled automated FISH assay platform for liquid handling.

[0180] In brief, cells were fixed in 4% formaldehyde (Thermo Fisher Scientific) for 15 minutes at RT, permeabilized with detergent for 3 minutes at RT and then treated with protease solution for 10 minutes at RT. Incubation of PNPLA3 and PPIB probe pairs was done for 3 hours, while for Preamplifiers, Amplifiers and Label Probes were for 1 hr each. All hybridization steps were carried out at 40° C. in a Cytomat 2 C-LIN automated incubator (Thermo Fisher Scientific). After hybridization reactions, cells were stained for 30 minutes with Hoechst and CellMask Blue (Thermo Fisher Scientific).

[0181] All plates were imaged on an Opera Phenix High Content Screening System (PerkinElmer), using the UV Channel for Hoechst 33342 and Cell Mask Blue, the 488 Channel for PPIB probes, and the 647 Channel for PNPLA3 probes.

[0182] The images were analyzed using Columbus Image Data Storage and Analysis System (PerkinElmer) to obtain mean spot counts per cell. The spot counts were normalized using the high (containing phosphate-buffered saline, Corning) and low (without target probe pairs) control wells. The normalized values against the total siRNA concentrations were plotted and the data were fit to a four-parameter sigmoidal model in Genedata Screener (Genedata) to obtain IC₅₀ and maximum activity. The results for all siRNAs generated are shown in Table 2. Results for the panel of 194 human/cyno siRNA molecules spanning the PNPLA3 CDR and annotated 3′UTR are shown in Table 3. Results for the panel of 162 human/cyno siRNA molecules targeting the extended 3′UTR are shown in Table 4, and results for the panel 64 human/marmoset siRNA molecules are shown in Table 5.

[0183] PNPLA3 knockdown provides a percentage of knockdown compared to control. Negative values indicate a decrease in PNPLA3 levels. 22 siRNA triggers achieved >75% mRNA knockdown. In comparison, a minor allele-specific siRNA directed to PNPLA3 I148M (described in WO 2020/123508) reduces the expression of PNPLA3 mRNA by approximately 81%. The top 48 triggers were synthesized as GalNAc-siRNA conjugates.

TABLE 2

| | PNPLA3 | % Avg Max | |
|---|---|---|---|
| Duplex No. | Location | Activity | Avg IC₅₀ (nM) |
| 44956-1 | 1233 | −97.0 | 1.61 |
| 45212-1 | 571 | −90.8 | 16.80 |
| 44928-1 | 1367 | −90.5 | 1.39 |
| 44912-1 | 449 | −88.2 | 1.99 |
| 45207-1 | 1564 | −87.8 | 9.98 |
| 45221-1 | 1379 | −86.7 | 38.80 |
| 44911-1 | 445 | −85.8 | 1.37 |
| 41946-1 | 844 | −85.8 | 1.59 |
| 44957-1 | 1234 | −84.3 | 0.33 |
| 42048-1 | 1561 | −83.6 | 1.92 |
| 41955-1 | 909 | −82.8 | 3.84 |
| 37781-1 | 698 | −82.7 | 2.69 |
| 44939-1 | 991 | −82.5 | 17.70 |
| 42064-1 | 1240 | −82.3 | 1.21 |
| 44908-1 | 396 | −82.3 | 2.88 |
| 41921-1 | 574 | −81.9 | 2.43 |
| 37893-1 | 768 | −81.8 | 5.28 |
| 41932-1 | 692 | −81.1 | 5.52 |
| 37600-1 | 347 | −80.9 | 1.77 |
| 37930-1 | 1219 | −80.9 | 2.11 |
| 38215-1 | 2198 | −80.2 | 1.78 |
| 45218-1 | 1184 | −79.8 | 19.00 |
| 37785-1 | 704 | −79.6 | 1.85 |
| 37744-1 | 391 | −79.6 | 2.68 |
| 45220-1 | 1185 | −79.5 | 19.30 |
| 38217-1 | 2200 | −79.4 | 1.93 |
| 41942-1 | 811 | −79.4 | 0.53 |
| 38216-1 | 2199 | −79.4 | 2.63 |
| 37745-1 | 392 | −79.3 | 2.49 |
| 44922-1 | 1359 | −79.0 | 4.64 |
| 44955-1 | 1168 | −79.0 | 4.93 |
| 41949-1 | 853 | −79.0 | 3.37 |
| 45201-1 | 1562 | −78.8 | 4.34 |
| 44905-1 | 812 | −78.8 | 2.95 |
| 45216-1 | 842 | −78.7 | 10.80 |
| 44910-1 | 442 | −78.7 | 13.40 |
| 41935-1 | 776 | −78.6 | 4.31 |
| 44909-1 | 397 | −78.6 | 2.14 |
| 44915-1 | 1328 | −78.6 | 4.53 |
| 41919-1 | 572 | −78.6 | 4.54 |
| 44946-1 | 1024 | −78.3 | 1.31 |
| 44949-1 | 1029 | −78.2 | 9.80 |
| 44940-1 | 994 | −78.0 | 4.38 |
| 42062-1 | 1236 | −78.0 | 2.04 |
| 45200-1 | 696 | −77.9 | 9.55 |
| 41950-1 | 854 | −77.9 | 11.75 |
| 44923-1 | 1361 | −77.9 | 14.60 |
| 37889-1 | 764 | −77.7 | 2.12 |
| 44914-1 | 459 | −76.9 | 3.20 |
| 42066-1 | 1266 | −76.7 | 14.70 |
| 37789-1 | 756 | −76.5 | 1.88 |
| 44950-1 | 1042 | −76.5 | 4.28 |
| 37588-1 | 309 | −76.4 | 1.50 |
| 37786-1 | 705 | −76.4 | 1.56 |
| 37864-1 | 1602 | −76.3 | 2.46 |
| 45199-1 | 695 | −76.2 | 6.84 |
| 37907-1 | 893 | −75.8 | 1.58 |
| 41954-1 | 907 | −75.6 | 5.08 |
| 41960-1 | 923 | −75.4 | 5.48 |
| 41953-1 | 906 | −75.4 | 4.68 |
| 37763-1 | 590 | −75.3 | 2.50 |
| 44927-1 | 1366 | −75.1 | 0.91 |
| 44918-1 | 1334 | −75.0 | 5.36 |
| 37915-1 | 905 | −75.0 | 11.08 |
| 41917-1 | 540 | −74.9 | 2.83 |
| 37843-1 | 1224 | −74.8 | 4.86 |
| 41920-1 | 573 | −74.8 | 4.89 |
| 37563-1 | 211 | −74.7 | 5.64 |
| 45217-1 | 790 | −74.6 | 22.90 |
| 45219-1 | 1262 | −74.3 | 29.80 |
| 37787-1 | 706 | −74.2 | 1.70 |
| 37846-1 | 1280 | −74.1 | 2.70 |
| 44951-1 | 1051 | −73.9 | 2.67 |
| 37765-1 | 593 | −73.7 | 2.61 |
| 42047-1 | 1560 | −73.7 | 15.82 |
| 42060-1 | 1229 | −73.7 | 1.96 |
| 37886-1 | 2197 | −73.6 | 2.11 |
| 44925-1 | 1364 | −73.6 | 5.41 |
| 37842-1 | 1223 | −73.3 | 2.30 |
| 44906-1 | 353 | −73.3 | 47.70 |
| 44920-1 | 1356 | −73.3 | 10.60 |
| 41922-1 | 576 | −73.3 | 1.17 |
| 45210-1 | 546 | −73.2 | 9.79 |
| 44917-1 | 1332 | −73.2 | 2.06 |
| 37567-1 | 220 | −73.0 | 2.02 |
| 37932-1 | 1220 | −72.9 | 2.69 |
| 38218-1 | 2201 | −72.6 | 1.64 |
| 37892-1 | 767 | −72.3 | 1.06 |
| 37908-1 | 894 | −72.3 | 2.04 |
| 41951-1 | 855 | −72.2 | 4.09 |
| 41947-1 | 845 | −72.2 | 1.21 |
| 42063-1 | 1237 | −72.1 | 0.52 |
| 38214-1 | 1092 | −71.3 | 4.71 |
| 37770-1 | 662 | −71.3 | 3.87 |
| 37865-1 | 1603 | −71.2 | 1.45 |
| 38210-1 | 1189 | −71.2 | 3.68 |
| 37758-1 | 562 | −71.2 | 2.61 |
| 37759-1 | 563 | −71.0 | 1.80 |
| 37913-1 | 902 | −70.8 | 2.32 |
| 37880-1 | 1890 | −70.5 | 3.03 |
| 44924-1 | 1363 | −70.5 | 3.45 |
| 41939-1 | 786 | −70.3 | 7.09 |
| 37858-1 | 1322 | −70.1 | 2.11 |
| 41945-1 | 817 | −70.1 | 1.36 |
| 44921-1 | 1358 | −69.8 | 6.09 |
| 44926-1 | 1365 | −69.8 | 4.52 |
| 45241-1 | 1013 | −69.6 | 26.60 |
| 37782-1 | 701 | −69.3 | 2.64 |
| 42054-1 | 989 | −69.3 | 14.45 |
| 37845-1 | 1226 | −69.2 | 5.66 |
| 37927-1 | 1201 | −69.1 | 2.08 |
| 42043-1 | 1554 | −69.1 | 2.53 |
| 37762-1 | 568 | −69.1 | 5.37 |
| 44947-1 | 1027 | −69.0 | 7.08 |
| 41952-1 | 856 | −68.7 | 2.23 |
| 42067-1 | 1268 | −68.5 | 3.03 |
| 42052-1 | 1618 | −68.3 | 2.86 |
| 42046-1 | 1558 | −68.0 | 9.21 |
| 42035-1 | 1376 | −68.0 | 3.19 |
| 42049-1 | 1607 | −67.9 | 5.67 |
| 40810-1 | 4193 | −67.9 | 1.81 |
| 37849-1 | 1300 | −67.9 | 1.60 |
| 38213-1 | 897 | −67.8 | 2.38 |
| 37897-1 | 832 | −67.6 | 1.64 |
| 37929-1 | 1213 | −67.6 | 1.10 |
| 37777-1 | 671 | −67.5 | 3.47 |
| 42034-1 | 1371 | −67.4 | 3.19 |
| 41910-1 | 510 | −67.2 | 7.79 |
| 42056-1 | 995 | −67.0 | 1.19 |
| 37874-1 | 1771 | −67.0 | 2.17 |
| 38220-1 | 2204 | −66.9 | 1.73 |
| 37903-1 | 878 | −66.8 | 1.84 |
| 37767-1 | 641 | −66.7 | 4.83 |
| 37912-1 | 899 | −66.7 | 9.32 |
| 42042-1 | 1553 | −66.7 | 7.24 |
| 41927-1 | 604 | −66.6 | 10.83 |
| 38212-1 | 1217 | −66.6 | 3.50 |
| 37871-1 | 1763 | −66.6 | 2.21 |
| 45263-1 | 458 | −66.4 | 38.60 |
| 44943-1 | 1020 | −66.4 | 16.40 |
| 44932-1 | 1446 | −66.2 | 3.83 |
| 42065-1 | 1250 | −66.2 | 3.16 |
| 38219-1 | 2202 | −66.2 | 1.75 |
| 37909-1 | 895 | −66.1 | 2.49 |
| 42061-1 | 1230 | −65.9 | 2.15 |
| 44937-1 | 966 | −65.9 | 11.50 |
| 40789-1 | 3858 | −65.9 | 1.60 |
| 44948-1 | 1028 | −65.8 | 5.49 |
| 37870-1 | 1760 | −65.6 | 1.27 |
| 45203-1 | 822 | −65.5 | 9.72 |
| 45334-1 | 451 | −65.4 | 0.78 |
| 40788-1 | 3857 | −65.2 | 1.00 |
| 41163-1 | 2187 | −65.2 | 0.94 |
| 40817-1 | 4260 | −65.2 | 2.35 |
| 37757-1 | 560 | −65.1 | 2.46 |
| 37872-1 | 1764 | −65.1 | 2.17 |
| 37756-1 | 557 | −65.0 | 5.74 |
| 37888-1 | 762 | −65.0 | 1.55 |
| 41031-1 | 5640 | −65.0 | 20.16 |
| 45215-1 | 1413 | −64.9 | 3.96 |
| 37753-1 | 497 | −64.9 | 5.10 |
| 41179-1 | 4117 | −64.8 | 1.68 |
| 41175-1 | 4112 | −64.7 | 1.08 |
| 41150-1 | 715 | −64.6 | 1.28 |
| 41959-1 | 919 | −64.6 | 3.24 |
| 37877-1 | 1852 | −64.5 | 3.61 |
| 41178-1 | 4116 | −64.5 | 0.25 |
| 45225-1 | 1333 | −64.2 | Undefined |
| 42050-1 | 1612 | −64.0 | 1.76 |
| 41914-1 | 514 | −63.9 | 6.33 |
| 37905-1 | 887 | −63.8 | 6.37 |
| 41174-1 | 3893 | −63.7 | 1.02 |
| 37866-1 | 1604 | −63.6 | 2.05 |
| 44944-1 | 1021 | −63.6 | 2.68 |
| 37920-1 | 1101 | −63.5 | 5.96 |
| 37760-1 | 564 | −63.4 | 11.50 |
| 42044-1 | 1556 | −63.3 | 17.39 |
| 37890-1 | 765 | −63.3 | 1.34 |
| 37921-1 | 1104 | −63.1 | 1.88 |
| 41943-1 | 813 | −63.1 | 3.87 |
| 41149-1 | 714 | −63.0 | 1.68 |
| 44929-1 | 1373 | −63.0 | 9.61 |
| 41908-1 | 360 | −62.6 | 13.30 |
| 37764-1 | 591 | −62.3 | 21.50 |
| 41145-1 | 422 | −62.3 | 0.78 |
| 37561-1 | 206 | −62.2 | 3.42 |
| 42055-1 | 992 | −62.1 | 2.82 |
| 37754-1 | 555 | −62.1 | 4.56 |
| 37570-1 | 245 | −61.7 | 3.21 |
| 37595-1 | 339 | −61.5 | 1.78 |
| 45250-1 | 1357 | −61.4 | Undefined |
| 37878-1 | 1855 | −61.3 | 2.78 |
| 40884-1 | 4500 | −61.2 | 5.64 |
| 44935-1 | 1500 | −61.0 | 24.20 |
| 44903-1 | 312 | −60.8 | 12.60 |
| 37583-1 | 302 | −60.6 | 3.39 |
| 38208-1 | 763 | −60.4 | 3.37 |
| 37585-1 | 305 | −60.3 | 22.60 |
| 37587-1 | 307 | −60.3 | 3.42 |
| 40866-1 | 4290 | −60.1 | 2.00 |
| 41152-1 | 718 | −60.1 | 0.35 |
| 37779-1 | 675 | −60.1 | 13.70 |
| 37761-1 | 567 | −60.0 | 2.81 |
| 45232-1 | 857 | −60.0 | 33.20 |
| 41928-1 | 605 | −60.0 | 2.81 |
| 41170-1 | 2269 | −59.9 | 2.02 |
| 37896-1 | 805 | −59.8 | 4.08 |
| 45257-1 | 608 | −59.8 | Undefined |
| 37891-1 | 766 | −59.8 | 1.09 |
| 37569-1 | 244 | −59.8 | 2.19 |
| 37910-1 | 896 | −59.7 | 8.15 |
| 44938-1 | 967 | −59.6 | Undefined |
| 41070-1 | 6594 | −59.6 | 1.76 |
| 37852-1 | 1312 | −59.4 | 4.67 |
| 37586-1 | 306 | −59.3 | 1.80 |
| 37580-1 | 291 | −59.1 | 7.76 |
| 37911-1 | 898 | −59.1 | 1.82 |
| 44952-1 | 1148 | −59.0 | 27.70 |
| 37581-1 | 293 | −58.8 | 3.74 |
| 42040-1 | 1516 | −58.6 | 14.84 |
| 37850-1 | 1310 | −58.4 | 3.73 |
| 41146-1 | 423 | −58.4 | 2.01 |
| 37565-1 | 213 | −58.1 | 13.90 |
| 37844-1 | 1225 | −58.0 | 3.70 |
| 37568-1 | 243 | −57.9 | 2.01 |
| 41941-1 | 807 | −57.8 | 1.86 |
| 41039-1 | 5674 | −57.7 | 1.12 |
| 37594-1 | 338 | −57.6 | 8.13 |
| 41142-1 | 266 | −57.6 | 2.01 |
| 37788-1 | 708 | −57.5 | 2.82 |
| 44904-1 | 774 | −57.5 | 5.83 |
| 37750-1 | 415 | −57.5 | 22.70 |
| 41934-1 | 694 | −57.3 | 1.26 |
| 45247-1 | 1494 | −57.3 | Undefined |
| 41915-1 | 515 | −57.3 | 8.83 |
| 40906-1 | 5578 | −57.3 | 2.78 |
| 41053-1 | 6199 | −57.2 | 0.25 |
| 41042-1 | 5680 | −57.0 | 1.20 |
| 40783-1 | 3813 | −56.9 | 3.54 |
| 37906-1 | 889 | −56.8 | Undefined |
| 40899-1 | 5012 | −56.8 | 3.59 |
| 41288-1 | 6644 | −56.7 | 1.74 |
| 41171-1 | 2273 | −56.7 | 2.83 |
| 37848-1 | 1296 | −56.2 | 2.86 |
| 37885-1 | 2014 | −56.1 | 2.87 |
| 37584-1 | 303 | −56.1 | 5.70 |
| 37873-1 | 1765 | −55.8 | 2.29 |
| 40907-1 | 5579 | −55.6 | 1.52 |
| 38221-1 | 2216 | −55.6 | 2.60 |
| 44919-1 | 1344 | −55.6 | 6.36 |
| 41052-1 | 6163 | −55.5 | 0.39 |
| 41155-1 | 723 | −55.5 | 0.23 |
| 37869-1 | 1757 | −55.4 | 2.63 |
| 41048-1 | 5741 | −55.2 | 1.72 |
| 37863-1 | 1596 | −55.1 | 2.53 |
| 44916-1 | 1329 | −55.1 | 15.50 |
| 41424-1 | 4119 | −55.0 | 1.83 |
| 37593-1 | 337 | −54.8 | 7.08 |
| 41050-1 | 6153 | −54.5 | 1.62 |
| 37578-1 | 272 | −54.5 | 4.98 |
| 37851-1 | 1311 | −54.0 | 2.55 |
| 44942-1 | 1010 | −53.8 | 22.60 |
| 37881-1 | 1917 | −53.7 | 6.86 |
| 37776-1 | 669 | −53.7 | 20.80 |
| 41162-1 | 1860 | −53.7 | 0.95 |
| 41944-1 | 814 | −53.6 | 0.76 |
| 41176-1 | 4113 | −53.4 | 1.27 |
| 41161-1 | 1858 | −53.3 | 0.68 |
| 37895-1 | 770 | −53.3 | 1.92 |
| 41911-1 | 511 | −53.1 | 2.80 |
| 41066-1 | 6573 | −53.0 | 0.23 |
| 40806-1 | 4140 | −52.9 | 2.26 |
| 37774-1 | 666 | −52.6 | 2.97 |
| 41153-1 | 721 | −52.5 | 1.43 |
| 42039-1 | 1504 | −52.3 | 3.54 |
| 41956-1 | 912 | −52.1 | 4.01 |
| 45246-1 | 1277 | −51.6 | Undefined |
| 40882-1 | 4495 | −51.3 | 3.01 |
| 44930-1 | 1416 | −51.2 | Undefined |
| 41916-1 | 538 | −51.2 | 2.64 |
| 37868-1 | 1754 | −51.1 | 2.21 |
| 41295-1 | 6635 | −51.1 | 0.62 |
| 37847-1 | 1289 | −51.0 | Undefined |
| 37597-1 | 341 | −51.0 | 3.81 |
| 38209-1 | 1095 | −51.0 | 3.54 |
| 37867-1 | 1666 | −50.9 | 2.42 |
| 44945-1 | 1022 | −50.9 | 16.00 |
| 44954-1 | 1152 | −50.8 | Undefined |
| 37876-1 | 1851 | −50.7 | Undefined |
| 41413-1 | 5820 | −50.6 | 1.46 |
| 41414-1 | 5819 | −50.6 | 1.19 |
| 37755-1 | 556 | −50.5 | 2.73 |
| 37572-1 | 248 | −50.5 | 10.30 |
| 37571-1 | 246 | −50.5 | 6.47 |
| 45239-1 | 988 | −50.5 | Undefined |
| 45211-1 | 1347 | −50.3 | Undefined |
| 41418-1 | 5771 | −50.3 | 1.73 |
| 37784-1 | 703 | −50.3 | 13.30 |
| 37775-1 | 667 | −50.3 | 7.64 |
| 41069-1 | 6576 | −50.3 | 1.26 |
| 45202-1 | 493 | −50.3 | Undefined |
| 37574-1 | 251 | −50.2 | 7.09 |
| 37861-1 | 1402 | −50.1 | 3.16 |
| 41299-1 | 6611 | −49.9 | 3.01 |
| 37562-1 | 207 | −49.8 | 3.77 |
| 37853-1 | 1317 | −49.8 | Undefined |
| 41057-1 | 6265 | −49.7 | 0.76 |
| 37747-1 | 412 | −49.6 | 2.21 |
| 40893-1 | 4958 | −49.6 | 7.06 |
| 37919-1 | 1094 | −49.6 | 8.21 |
| 41925-1 | 585 | −49.3 | 8.51 |
| 40782-1 | 3796 | −49.3 | 3.35 |
| 37768-1 | 660 | −49.3 | 1.70 |
| 37859-1 | 1352 | −49.0 | 4.78 |
| 44953-1 | 1149 | −49.0 | Undefined |
| 37766-1 | 595 | −48.8 | 2.62 |
| 41065-1 | 6571 | −48.7 | 1.96 |
| 41931-1 | 691 | −48.6 | 1.18 |
| 41177-1 | 4115 | −48.4 | 2.23 |
| 37899-1 | 867 | −48.3 | 5.69 |
| 42041-1 | 1517 | −48.3 | 6.18 |
| 41924-1 | 584 | −48.2 | 6.92 |
| 41957-1 | 916 | −47.9 | 0.73 |
| 41294-1 | 6636 | −47.9 | 1.72 |
| 45259-1 | 351 | −47.8 | 40.30 |
| 42045-1 | 1557 | −47.8 | 5.43 |
| 37884-1 | 2013 | −47.3 | 2.45 |
| 37769-1 | 661 | −47.3 | Undefined |
| 41289-1 | 6643 | −47.2 | 0.78 |
| 45233-1 | 354 | −47.2 | Undefined |
| 40885-1 | 4543 | −47.2 | 3.40 |
| 45258-1 | 606 | −47.1 | Undefined |
| 37557-1 | 121 | −47.0 | 3.90 |
| 45204-1 | 460 | −46.8 | 12.60 |
| 40865-1 | 4289 | −46.7 | 2.97 |
| 37875-1 | 1775 | −46.7 | 2.43 |
| 37841-1 | 1221 | −46.5 | 4.28 |
| 41307-1 | 4046 | −46.2 | 3.56 |
| 37882-1 | 1918 | −46.2 | 3.15 |
| 41426-1 | 258 | −46.1 | 2.53 |
| 37749-1 | 414 | −45.9 | 4.85 |
| 37559-1 | 204 | −45.8 | 3.19 |
| 40898-1 | 4968 | −45.8 | 1.01 |
| 40900-1 | 5026 | −45.7 | 0.91 |
| 37783-1 | 702 | −45.7 | 5.25 |
| 37560-1 | 205 | −45.4 | 3.29 |
| 42038-1 | 1450 | −45.4 | 1.28 |
| 41410-1 | 5824 | −45.4 | 2.16 |
| 37772-1 | 664 | −45.3 | 1.66 |
| 37599-1 | 344 | −45.2 | 12.00 |
| 40892-1 | 4957 | −45.2 | 3.78 |
| 41151-1 | 716 | −45.1 | 3.55 |
| 37917-1 | 939 | −45.1 | 1.76 |
| 41408-1 | 6601 | −45.0 | 6.07 |
| 37926-1 | 1200 | −45.0 | Undefined |
| 37752-1 | 419 | −44.8 | 26.80 |
| 41293-1 | 6637 | −44.7 | 0.72 |
| 41948-1 | 848 | −44.6 | 1.07 |
| 40777-1 | 3775 | −44.6 | 8.56 |
| 40784-1 | 3820 | −44.5 | 10.52 |
| 41308-1 | 4008 | −44.5 | 4.12 |
| 42069-1 | 1324 | −44.5 | 0.51 |
| 41933-1 | 693 | −44.2 | 1.02 |
| 44907-1 | 357 | −44.1 | 13.10 |
| 41169-1 | 2268 | −43.9 | 0.39 |
| 41030-1 | 5601 | −43.4 | 1.14 |
| 37748-1 | 413 | −43.2 | 3.55 |
| 37901-1 | 869 | −42.7 | Undefined |
| 37856-1 | 1320 | −42.6 | 3.47 |
| 45264-1 | 197 | −42.5 | Undefined |
| 41157-1 | 730 | −42.5 | 1.26 |
| 41290-1 | 6641 | −42.5 | 0.78 |
| 41912-1 | 512 | −42.2 | 1.75 |
| 45229-1 | 782 | −42.0 | Undefined |
| 41280-1 | 6686 | −41.8 | 0.92 |
| 41936-1 | 777 | −41.6 | 0.72 |
| 37883-1 | 2012 | −41.5 | 13.70 |
| 40791-1 | 3862 | −41.3 | 2.68 |
| 40779-1 | 3793 | −41.1 | 1.67 |
| 41937-1 | 778 | −41.0 | 1.49 |
| 41300-1 | 6610 | −41.0 | 12.53 |
| 37582-1 | 294 | −40.9 | Undefined |
| 37904-1 | 886 | −40.8 | 8.22 |
| 37857-1 | 1321 | −40.7 | 1.62 |
| 41420-1 | 5707 | −40.5 | 2.86 |
| 41419-1 | 5770 | −40.5 | 1.77 |
| 38211-1 | 1210 | −39.9 | Undefined |
| 45248-1 | 1439 | −39.7 | 45.30 |
| 45236-1 | 402 | −39.7 | Undefined |
| 42053-1 | 985 | −39.6 | Undefined |
| 37879-1 | 1857 | −39.6 | Undefined |
| 41040-1 | 5676 | −39.3 | 9.14 |
| 37746-1 | 411 | −39.2 | 32.60 |
| 37743-1 | 369 | −39.2 | 7.55 |
| 37924-1 | 1125 | −39.0 | 14.50 |
| 45213-1 | 1081 | −38.8 | Undefined |
| 37751-1 | 416 | −38.8 | 21.10 |
| 42059-1 | 1044 | −38.6 | 10.70 |
| 37564-1 | 212 | −38.1 | Undefined |
| 45249-1 | 1039 | −38.0 | Undefined |
| 41298-1 | 6612 | −38.0 | 0.25 |
| 40903-1 | 5571 | −38.0 | 3.19 |
| 40818-1 | 4261 | −37.9 | Undefined |
| 41923-1 | 583 | −37.8 | 1.98 |
| 41909-1 | 490 | −37.4 | 2.42 |
| 42037-1 | 1445 | −37.3 | Undefined |
| 37773-1 | 665 | −37.2 | >100 |
| 40864-1 | 4286 | −37.1 | 1.59 |
| 41291-1 | 6640 | −36.8 | 0.58 |
| 41281-1 | 6685 | −36.8 | 0.70 |
| 41287-1 | 6669 | −36.8 | 1.42 |
| 37566-1 | 219 | −36.7 | Undefined |
| 41958-1 | 918 | −36.7 | 0.18 |
| 45256-1 | 352 | −36.5 | Undefined |
| 37771-1 | 663 | −36.4 | >100 |
| 41049-1 | 5967 | −36.4 | 1.18 |
| 40795-1 | 3958 | −36.1 | 2.49 |
| 41284-1 | 6676 | −36.1 | 0.18 |
| 41305-1 | 5642 | −36.0 | Undefined |
| 40790-1 | 3860 | −36.0 | 1.85 |
| 41301-1 | 6162 | −35.8 | Undefined |
| 41166-1 | 2191 | −35.8 | 0.31 |
| 40796-1 | 4006 | −35.8 | 2.18 |
| 41309-1 | 3773 | −35.7 | 2.48 |
| 41285-1 | 6671 | −35.5 | 1.14 |
| 41158-1 | 1136 | −35.3 | 3.51 |
| 40888-1 | 4903 | −35.2 | Undefined |
| 41282-1 | 6684 | −35.0 | 0.22 |
| 40792-1 | 3920 | −34.9 | 2.40 |
| 41046-1 | 5736 | −34.2 | 0.60 |
| 41913-1 | 513 | −34.2 | 4.74 |
| 40891-1 | 4906 | −34.1 | 1.86 |
| 41156-1 | 729 | −34.1 | 0.26 |
| 41421-1 | 4983 | −33.6 | Undefined |
| 41286-1 | 6670 | −33.6 | 0.38 |
| 40808-1 | 4186 | −33.5 | Undefined |
| 40780-1 | 3794 | −33.1 | 1.49 |
| 40878-1 | 4484 | −33.1 | 7.66 |
| 40785-1 | 3851 | −33.0 | 3.36 |
| 41297-1 | 6613 | −32.9 | 0.39 |
| 45209-1 | 1038 | −32.6 | Undefined |
| 40875-1 | 4402 | −32.2 | 3.47 |
| 41173-1 | 2639 | −32.2 | 4.98 |
| 41051-1 | 6157 | −32.1 | 1.39 |
| 41147-1 | 424 | −32.0 | 1.80 |
| 41415-1 | 5774 | −31.6 | 0.93 |
| 41154-1 | 722 | −31.4 | 1.72 |
| 40805-1 | 4139 | −31.3 | 2.89 |
| 41044-1 | 5692 | −31.3 | 0.33 |
| 37780-1 | 679 | −31.1 | 40.40 |
| 41306-1 | 4097 | −31.0 | 1.16 |
| 41159-1 | 1137 | −30.9 | 0.30 |
| 37855-1 | 1319 | −30.8 | >100 |
| 40797-1 | 4020 | −30.7 | 1.24 |
| 41160-1 | 1162 | −30.6 | 2.11 |
| 41045-1 | 5705 | −30.5 | Undefined |
| 41068-1 | 6575 | −30.4 | 1.82 |
| 44941-1 | 1003 | −30.3 | 18.20 |
| 40902-1 | 5569 | −30.1 | 1.05 |
| 41180-1 | 4118 | −30.0 | 0.73 |
| 41283-1 | 6683 | −30.0 | 0.34 |
| 40887-1 | 4902 | −29.9 | 22.40 |
| 40896-1 | 4965 | −29.9 | Undefined |
| 41054-1 | 6201 | −29.3 | 0.76 |
| 41168-1 | 2267 | −29.3 | Undefined |
| 41033-1 | 5668 | −29.0 | 2.21 |
| 37590-1 | 334 | −28.3 | >100 |
| 41296-1 | 6614 | −28.3 | 1.30 |
| 41918-1 | 542 | −28.2 | Undefined |
| 37862-1 | 1431 | −28.2 | Undefined |
| 45237-1 | 448 | −28.2 | Undefined |
| 41292-1 | 6638 | −28.0 | 0.44 |
| 45240-1 | 1006 | −27.9 | Undefined |
| 37898-1 | 866 | −27.7 | >100 |
| 41411-1 | 5823 | −27.5 | Undefined |
| 45222-1 | 194 | −27.3 | Undefined |
| 40803-1 | 4137 | −27.2 | 2.73 |
| 41043-1 | 5681 | −26.7 | 0.51 |
| 37558-1 | 122 | −26.7 | >100 |
| 41059-1 | 6268 | −26.6 | 0.24 |
| 40868-1 | 4318 | −26.4 | 2.72 |
| 41422-1 | 4441 | −26.4 | 1.72 |
| 40880-1 | 4488 | −26.2 | 1.92 |
| 40816-1 | 4259 | −25.9 | 4.50 |
| 41302-1 | 6158 | −25.8 | 1.97 |
| 37596-1 | 340 | −25.5 | >100 |
| 37914-1 | 904 | −25.2 | Undefined |
| 41032-1 | 5641 | −25.1 | 2.63 |
| 40881-1 | 4491 | −25.1 | 1.40 |
| 37598-1 | 343 | −24.8 | >100 |
| 41409-1 | 5857 | −24.8 | >33.3 |
| 41416-1 | 5773 | −24.5 | >100 |
| 41038-1 | 5673 | −23.7 | >33.3 |
| 40786-1 | 3853 | −23.4 | >33.3 |
| 41062-1 | 6280 | −23.2 | Undefined |
| 40811-1 | 4199 | −23.1 | >100 |
| 45235-1 | 364 | −23.0 | >100 |
| 37556-1 | 115 | −22.8 | >100 |
| 40883-1 | 4496 | −22.6 | >100 |
| 40793-1 | 3921 | −22.5 | >100 |
| 40781-1 | 3795 | −22.4 | >100 |
| 45226-1 | 317 | −22.2 | >100 |
| 44931-1 | 1435 | −21.9 | >100 |
| 40813-1 | 4203 | −21.9 | >100 |
| 45254-1 | 358 | −21.8 | >100 |
| 45255-1 | 356 | −21.5 | >100 |
| 45243-1 | 1239 | −21.4 | >100 |
| 40809-1 | 4191 | −20.7 | 3.46 |
| 41417-1 | 5772 | −20.6 | >100 |
| 40895-1 | 4963 | −20.5 | >100 |
| 40890-1 | 4905 | −20.1 | >100 |
| 45230-1 | 783 | −19.8 | >100 |
| 40799-1 | 4129 | −19.4 | >33.3 |
| 40801-1 | 4132 | −19.4 | >100 |
| 45214-1 | 792 | −19.4 | >100 |
| 41930-1 | 688 | −19.2 | >100 |
| 45234-1 | 355 | −18.7 | >100 |
| 40876-1 | 4403 | −18.7 | >100 |
| 37900-1 | 868 | −18.6 | >100 |
| 41058-1 | 6267 | −18.5 | >100 |
| 41055-1 | 6202 | −18.1 | >100 |
| 41063-1 | 6503 | −17.9 | 0.69 |
| 41165-1 | 2190 | −17.9 | >100 |
| 45206-1 | 492 | −17.8 | >100 |
| 41041-1 | 5679 | −17.5 | >100 |
| 42057-1 | 1009 | −16.9 | >100 |
| 40870-1 | 4361 | −16.8 | >100 |
| 37592-1 | 336 | −16.7 | >100 |
| 37589-1 | 329 | −16.5 | >100 |
| 37854-1 | 1318 | −16.4 | >100 |
| 40897-1 | 4966 | −16.4 | >100 |
| 45242-1 | 1235 | −16.3 | >100 |
| 42058-1 | 1040 | −16.2 | >100 |
| 45238-1 | 1501 | −16.1 | >100 |
| 38207-1 | 112 | −15.7 | >100 |
| 41143-1 | 269 | −15.7 | 0.43 |
| 41423-1 | 4160 | −15.6 | >100 |
| 40807-1 | 4184 | −15.2 | >100 |
| 40905-1 | 5576 | −15.0 | >100 |
| 41061-1 | 6279 | −14.6 | >100 |
| 41056-1 | 6243 | −14.3 | >100 |
| 40778-1 | 3776 | −14.2 | >100 |
| 37591-1 | 335 | −14.2 | >100 |
| 40889-1 | 4904 | −13.7 | >100 |
| 37887-1 | 757 | −13.4 | 1.18 |
| 40901-1 | 5215 | −12.9 | >100 |
| 40802-1 | 4135 | −12.8 | >100 |
| 45260-1 | 318 | −12.6 | >100 |
| 40879-1 | 4487 | −12.5 | >100 |
| 42051-1 | 1614 | −12.3 | >100 |
| 40863-1 | 4283 | −12.3 | >100 |
| 40877-1 | 4404 | −12.1 | >100 |
| 37923-1 | 1121 | −11.5 | >100 |
| 45253-1 | 395 | −11.3 | >100 |
| 40800-1 | 4130 | −11.0 | >100 |
| 41035-1 | 5670 | −10.6 | >100 |
| 45208-1 | 327 | −10.3 | >100 |
| 45251-1 | 1354 | −10.0 | >100 |
| 44934-1 | 1497 | −9.8 | >100 |
| 45245-1 | 1264 | −9.4 | >100 |
| 37577-1 | 254 | −8.7 | >100 |
| 45262-1 | 315 | −8.5 | >100 |
| 40794-1 | 3923 | −8.5 | >100 |
| 41060-1 | 6271 | −7.7 | >100 |
| 41167-1 | 2193 | −7.6 | >100 |
| 41940-1 | 788 | −7.6 | >100 |
| 40886-1 | 4901 | −7.4 | >100 |
| 45261-1 | 467 | −7.3 | >100 |
| 40814-1 | 4251 | −7.2 | >100 |
| 40869-1 | 4360 | −7.1 | >100 |
| 40867-1 | 4291 | −6.6 | >100 |
| 45228-1 | 601 | −6.4 | >100 |
| 37902-1 | 870 | −6.1 | >100 |
| 45227-1 | 32 | −6.1 | >100 |
| 37860-1 | 1399 | −6.0 | >100 |
| 41430-1 | 21 | −5.5 | >100 |
| 40871-1 | 4362 | −4.7 | >100 |
| 44936-1 | 1520 | −4.3 | >100 |
| 41172-1 | 2274 | −4.2 | >100 |
| 44913-1 | 450 | −3.2 | >100 |
| 40908-1 | 5600 | −3.0 | >100 |
| 41429-1 | 22 | −2.6 | >100 |
| 45252-1 | 446 | −2.1 | >100 |
| 37576-1 | 253 | −2.0 | >100 |
| 45223-1 | 452 | −1.8 | >100 |
| 41047-1 | 5740 | −0.9 | >100 |
| 40798-1 | 4095 | −0.8 | >100 |
| 41427-1 | 257 | −0.7 | >100 |
| 45231-1 | 843 | −0.6 | >100 |
| 40815-1 | 4254 | −0.6 | >100 |
| 45205-1 | 491 | −0.5 | >100 |
| 40812-1 | 4202 | −0.4 | >100 |
| 37778-1 | 673 | 0.3 | >100 |
| 37573-1 | 249 | 0.5 | >100 |
| 42036-1 | 1417 | 0.9 | >100 |
| 40904-1 | 5575 | 2.2 | >100 |
| 40894-1 | 4962 | 2.3 | >100 |
| 37555-1 | 113 | 3.6 | >100 |
| 37579-1 | 281 | 3.7 | >100 |
| 40872-1 | 4363 | 4.2 | >100 |
| 37894-1 | 769 | 5.0 | >100 |
| 40819-1 | 4262 | 5.4 | >100 |
| 41141-1 | 143 | 5.4 | >100 |
| 41938-1 | 781 | 5.4 | >100 |
| 41148-1 | 586 | 5.5 | >100 |
| 41064-1 | 6568 | 5.5 | >100 |
| 41144-1 | 420 | 6.9 | >100 |
| 41303-1 | 6154 | 8.5 | >100 |
| 45224-1 | 489 | 8.7 | >100 |
| 40874-1 | 4398 | 9.5 | >100 |
| 45244-1 | 1248 | 10.3 | >100 |
| 41140-1 | 138 | 10.5 | >100 |
| 40787-1 | 3854 | 11.5 | >100 |
| 41036-1 | 5671 | 11.6 | >100 |
| 42068-1 | 1269 | 12.4 | >100 |
| 44933-1 | 1451 | 13.6 | >100 |
| 37575-1 | 252 | 13.8 | >100 |
| 40862-1 | 4263 | 14.2 | >100 |
| 41929-1 | 615 | 15.9 | >100 |
| 41164-1 | 2189 | 20.4 | >100 |
| 41428-1 | 142 | 21.1 | >100 |
| 41304-1 | 5691 | 21.2 | >100 |
| 40804-1 | 4138 | 34.1 | >100 |
| 41412-1 | 5822 | 34.3 | >100 |
| 41067-1 | 6574 | 36.3 | >100 |
| 40873-1 | 4369 | 37.6 | >100 |
| 41037-1 | 5672 | 38.0 | >100 |
| 41425-1 | 262 | 39.7 | >100 |
| 41034-1 | 5669 | 40.4 | >100 |
| 41926-1 | 603 | 46.7 | >100 |

TABLE 3
RNA FISH Assay with Human/Cyno PNPLA3-Spanning siRNA

| | PNPLA3 | PNPLA3 |
|---|---|---|
| Duplex No. | Location | knockdown (%) |
| 38207-1 | 112 | −15.7 |
| 37555-1 | 113 | 3.6 |
| 37556-1 | 115 | −22.8 |
| 37557-1 | 121 | −47.0 |
| 37558-1 | 122 | −26.7 |
| 37559-1 | 204 | −45.8 |
| 37560-1 | 205 | −45.4 |
| 37561-1 | 206 | −62.2 |
| 37562-1 | 207 | −49.8 |
| 37563-1 | 211 | −74.7 |
| 37564-1 | 212 | −38.1 |
| 37565-1 | 213 | −58.1 |
| 37566-1 | 219 | −36.7 |
| 37567-1 | 220 | −73.0 |
| 37568-1 | 243 | −57.9 |
| 37569-1 | 244 | −59.8 |
| 37570-1 | 245 | −61.7 |
| 37571-1 | 246 | −50.5 |
| 37572-1 | 248 | −50.5 |
| 37573-1 | 249 | 0.5 |
| 37574-1 | 251 | −50.2 |
| 37575-1 | 252 | 13.8 |
| 37576-1 | 253 | −2.0 |
| 37577-1 | 254 | −4.4 |
| 37578-1 | 272 | −54.5 |
| 37579-1 | 281 | 3.7 |
| 37580-1 | 291 | −59.1 |
| 37581-1 | 293 | −58.8 |
| 37582-1 | 294 | −40.9 |
| 37583-1 | 302 | −60.6 |
| 37584-1 | 303 | −56.1 |
| 37585-1 | 305 | −60.3 |
| 37586-1 | 306 | −59.3 |
| 37587-1 | 307 | −60.3 |
| 37588-1 | 309 | −76.4 |
| 37589-1 | 329 | −17.8 |
| 37590-1 | 334 | −28.3 |
| 37591-1 | 335 | −14.2 |
| 37592-1 | 336 | −16.7 |
| 37593-1 | 337 | −54.8 |
| 37594-1 | 338 | −57.6 |
| 37595-1 | 339 | −61.5 |
| 37596-1 | 340 | −25.5 |
| 37597-1 | 341 | −51.0 |
| 37598-1 | 343 | −24.8 |
| 37599-1 | 344 | −45.2 |
| 37600-1 | 347 | −80.9 |
| 37743-1 | 369 | −32.7 |
| 37744-1 | 391 | −79.6 |
| 37745-1 | 392 | −77.0 |
| 37746-1 | 411 | −39.2 |
| 37747-1 | 412 | −49.6 |
| 37748-1 | 413 | −43.2 |
| 37749-1 | 414 | −45.9 |
| 37750-1 | 415 | −57.5 |
| 37751-1 | 416 | −38.8 |
| 37752-1 | 419 | −44.8 |
| 37753-1 | 497 | −64.9 |
| 37754-1 | 555 | −62.1 |
| 37755-1 | 556 | −50.5 |
| 37756-1 | 557 | −65.0 |
| 37757-1 | 560 | −65.1 |
| 37758-1 | 562 | −71.2 |
| 37759-1 | 563 | −71.0 |
| 37760-1 | 564 | −63.4 |
| 37761-1 | 567 | −60.0 |
| 37762-1 | 568 | −69.1 |
| 37763-1 | 590 | −75.3 |
| 37764-1 | 591 | −62.3 |
| 37765-1 | 593 | −73.7 |
| 37766-1 | 595 | −48.8 |
| 37767-1 | 641 | −66.7 |
| 37768-1 | 660 | −49.3 |
| 37769-1 | 661 | −47.3 |
| 37770-1 | 662 | −71.3 |
| 37771-1 | 663 | −36.4 |
| 37772-1 | 664 | −45.3 |
| 37773-1 | 665 | −37.2 |
| 37774-1 | 666 | −52.6 |
| 37775-1 | 667 | −50.3 |
| 37776-1 | 669 | −53.7 |
| 37777-1 | 671 | −67.5 |
| 37778-1 | 673 | 0.3 |
| 37779-1 | 675 | −60.1 |
| 37780-1 | 679 | −39.6 |
| 37781-1 | 698 | −76.0 |
| 37782-1 | 701 | −69.3 |
| 37783-1 | 702 | −45.7 |
| 37784-1 | 703 | −50.3 |
| 37785-1 | 704 | −79.6 |
| 37786-1 | 705 | −76.4 |
| 37787-1 | 706 | −74.2 |
| 37788-1 | 708 | −57.5 |
| 37789-1 | 756 | −76.5 |
| 37887-1 | 757 | −13.4 |
| 37888-1 | 762 | −65.0 |
| 38208-1 | 763 | −60.4 |
| 37889-1 | 764 | −77.7 |
| 37890-1 | 765 | −63.3 |
| 37891-1 | 766 | −59.8 |
| 37892-1 | 767 | −72.3 |
| 37893-1 | 768 | −81.8 |
| 37894-1 | 769 | 5.0 |
| 37895-1 | 770 | −53.3 |
| 37896-1 | 805 | −59.8 |
| 37897-1 | 832 | −67.6 |
| 37898-1 | 866 | −27.7 |
| 37899-1 | 867 | −48.3 |
| 37900-1 | 868 | −18.6 |
| 37901-1 | 869 | −42.7 |
| 37902-1 | 870 | −6.1 |
| 37903-1 | 878 | −66.8 |
| 37904-1 | 886 | −40.8 |
| 37905-1 | 887 | −63.8 |
| 37906-1 | 889 | −56.8 |
| 37907-1 | 893 | −75.8 |
| 37908-1 | 894 | −72.3 |
| 37909-1 | 895 | −66.1 |
| 37910-1 | 896 | −59.7 |
| 38213-1 | 897 | −67.8 |
| 37911-1 | 898 | −59.1 |
| 37912-1 | 899 | −66.7 |
| 37913-1 | 902 | −70.8 |
| 37914-1 | 904 | −25.2 |
| 37915-1 | 905 | −67.7 |
| 37917-1 | 939 | −45.1 |
| 38214-1 | 1092 | −71.3 |
| 37919-1 | 1094 | −49.6 |
| 38209-1 | 1095 | −51.0 |
| 37920-1 | 1101 | −63.5 |
| 37921-1 | 1104 | −63.1 |
| 37923-1 | 1121 | −11.5 |
| 37924-1 | 1125 | −39.0 |
| 38210-1 | 1189 | −71.2 |
| 37926-1 | 1200 | −45.0 |
| 37927-1 | 1201 | −69.1 |
| 38211-1 | 1210 | −39.9 |
| 37929-1 | 1213 | −67.6 |
| 38212-1 | 1217 | −66.6 |
| 37930-1 | 1219 | −80.9 |
| 37932-1 | 1220 | −72.9 |
| 37841-1 | 1221 | −46.5 |
| 37842-1 | 1223 | −73.3 |
| 37843-1 | 1224 | −74.8 |
| 37844-1 | 1225 | −58.0 |
| 37845-1 | 1226 | −73.0 |
| 37846-1 | 1280 | −74.1 |
| 37847-1 | 1289 | −51.0 |
| 37848-1 | 1296 | −56.2 |
| 37849-1 | 1300 | −67.9 |
| 37850-1 | 1310 | −58.4 |
| 37851-1 | 1311 | −54.0 |
| 37852-1 | 1312 | −59.4 |
| 37853-1 | 1317 | −49.8 |
| 37854-1 | 1318 | −16.4 |
| 37855-1 | 1319 | −30.8 |
| 37856-1 | 1320 | −42.6 |
| 37857-1 | 1321 | −40.7 |
| 37858-1 | 1322 | −70.1 |
| 37859-1 | 1352 | −62.5 |
| 37860-1 | 1399 | −20.3 |
| 37861-1 | 1402 | −50.1 |
| 37862-1 | 1431 | −28.2 |
| 37863-1 | 1596 | −55.1 |
| 37864-1 | 1602 | −76.3 |
| 37865-1 | 1603 | −71.2 |
| 37866-1 | 1604 | −63.6 |
| 37867-1 | 1666 | −50.9 |
| 37868-1 | 1754 | −51.1 |
| 37869-1 | 1757 | −55.4 |
| 37870-1 | 1760 | −65.6 |
| 37871-1 | 1763 | −66.6 |
| 37872-1 | 1764 | −65.1 |
| 37873-1 | 1765 | −55.8 |
| 37874-1 | 1771 | −67.0 |
| 37875-1 | 1775 | −46.7 |
| 37876-1 | 1851 | −50.7 |
| 37877-1 | 1852 | −64.5 |
| 37878-1 | 1855 | −61.3 |
| 37879-1 | 1857 | −39.6 |
| 37880-1 | 1890 | −70.5 |
| 37881-1 | 1917 | −53.7 |
| 37882-1 | 1918 | −46.2 |
| 37883-1 | 2012 | −41.5 |
| 37884-1 | 2013 | −47.3 |
| 37885-1 | 2014 | −56.1 |
| 37886-1 | 2197 | −73.6 |
| 38215-1 | 2198 | −80.2 |
| 38216-1 | 2199 | −79.4 |
| 38217-1 | 2200 | −79.4 |
| 38218-1 | 2201 | −72.6 |
| 38219-1 | 2202 | −66.2 |
| 38220-1 | 2204 | −66.9 |
| 38221-1 | 2216 | −55.6 |

TABLE 4
RNA FISH Assay with Human/Cyno
PNPLA3 Extended 3′ UTR siRNA

| | PNPLA3 | PNPLA3 |
|---|---|---|
| Duplex No. | Location | knockdown (%) |
| 41309-1 | 3773 | −35.7 |
| 40777-1 | 3775 | −51.4 |
| 40778-1 | 3776 | −14.2 |
| 40779-1 | 3793 | −45.5 |
| 40780-1 | 3794 | −33.1 |
| 40781-1 | 3795 | −22.4 |
| 40782-1 | 3796 | −43.5 |
| 40783-1 | 3813 | −49.7 |
| 40784-1 | 3820 | −41.5 |
| 40785-1 | 3851 | −33.0 |
| 40786-1 | 3853 | −23.4 |
| 40787-1 | 3854 | 11.5 |
| 40788-1 | 3857 | −60.2 |
| 40789-1 | 3858 | −66.3 |
| 40790-1 | 3860 | −36.0 |
| 40791-1 | 3862 | −38.3 |
| 40792-1 | 3920 | −34.9 |
| 40793-1 | 3921 | −22.5 |
| 40794-1 | 3923 | −8.5 |
| 40795-1 | 3958 | −42.7 |
| 40796-1 | 4006 | −35.8 |
| 41308-1 | 4008 | −41.7 |
| 40797-1 | 4020 | −30.7 |
| 41307-1 | 4046 | −48.3 |
| 40798-1 | 4095 | −0.8 |
| 41306-1 | 4097 | −31.0 |
| 40799-1 | 4129 | −19.4 |
| 40800-1 | 4130 | −11.0 |
| 40801-1 | 4132 | −19.4 |
| 40802-1 | 4135 | −12.8 |
| 40803-1 | 4137 | −27.2 |
| 40804-1 | 4138 | 34.1 |
| 40805-1 | 4139 | −31.3 |
| 40806-1 | 4140 | −47.1 |
| 40807-1 | 4184 | −15.2 |
| 40808-1 | 4186 | −33.5 |
| 40809-1 | 4191 | −47.8 |
| 40810-1 | 4193 | −67.3 |
| 40811-1 | 4199 | −23.1 |
| 40812-1 | 4202 | −0.4 |
| 40813-1 | 4203 | −21.9 |
| 40814-1 | 4251 | −7.2 |
| 40815-1 | 4254 | −0.6 |
| 40816-1 | 4259 | −25.9 |
| 40817-1 | 4260 | −50.9 |
| 40818-1 | 4261 | −37.9 |
| 40819-1 | 4262 | 5.4 |
| 40862-1 | 4263 | 14.2 |
| 40863-1 | 4283 | −12.3 |
| 40864-1 | 4286 | −37.1 |
| 40865-1 | 4289 | −42.4 |
| 40866-1 | 4290 | −61.5 |
| 40867-1 | 4291 | −6.6 |
| 40868-1 | 4318 | −26.4 |
| 40869-1 | 4360 | −7.1 |
| 40870-1 | 4361 | −16.8 |
| 40871-1 | 4362 | −4.7 |
| 40872-1 | 4363 | 4.2 |
| 40873-1 | 4369 | 37.6 |
| 40874-1 | 4398 | 9.5 |
| 40875-1 | 4402 | −42.4 |
| 40876-1 | 4403 | −18.7 |
| 40877-1 | 4404 | −12.1 |
| 40878-1 | 4484 | −33.1 |
| 40879-1 | 4487 | −12.5 |
| 40880-1 | 4488 | −26.2 |
| 40881-1 | 4491 | −25.1 |
| 40882-1 | 4495 | −52.1 |
| 40883-1 | 4496 | −22.6 |
| 40884-1 | 4500 | −57.0 |
| 40885-1 | 4543 | −47.2 |
| 40886-1 | 4901 | −7.4 |
| 40887-1 | 4902 | −29.9 |
| 40888-1 | 4903 | −35.2 |
| 40889-1 | 4904 | −13.7 |
| 40890-1 | 4905 | −20.1 |
| 40891-1 | 4906 | −34.1 |
| 40892-1 | 4957 | −38.1 |
| 40893-1 | 4958 | −41.3 |
| 40894-1 | 4962 | 2.3 |
| 40895-1 | 4963 | −20.5 |
| 40896-1 | 4965 | −29.9 |
| 40897-1 | 4966 | −16.4 |
| 40898-1 | 4968 | −42.4 |
| 40899-1 | 5012 | −46.0 |
| 40900-1 | 5026 | −42.2 |
| 40901-1 | 5215 | −12.9 |
| 40902-1 | 5569 | −30.1 |
| 40903-1 | 5571 | −54.7 |
| 40904-1 | 5575 | 2.2 |
| 40905-1 | 5576 | −15.0 |
| 40906-1 | 5578 | −49.9 |
| 40907-1 | 5579 | −57.2 |
| 40908-1 | 5600 | −3.0 |
| 41030-1 | 5601 | −40.8 |
| 41031-1 | 5640 | −44.1 |
| 41032-1 | 5641 | −25.1 |
| 41305-1 | 5642 | −36.0 |
| 41033-1 | 5668 | −29.0 |
| 41034-1 | 5669 | 40.4 |
| 41035-1 | 5670 | −10.6 |
| 41036-1 | 5671 | 11.6 |
| 41037-1 | 5672 | 38.0 |
| 41038-1 | 5673 | −23.7 |
| 41039-1 | 5674 | −54.9 |
| 41040-1 | 5676 | −46.4 |
| 41041-1 | 5679 | −17.5 |
| 41042-1 | 5680 | −55.6 |
| 41043-1 | 5681 | −26.7 |
| 41304-1 | 5691 | 21.2 |
| 41044-1 | 5692 | −31.3 |
| 41045-1 | 5705 | −30.5 |
| 41046-1 | 5736 | −49.3 |
| 41047-1 | 5740 | −0.9 |
| 41048-1 | 5741 | −49.7 |
| 41049-1 | 5967 | −36.4 |
| 41050-1 | 6153 | −56.7 |
| 41303-1 | 6154 | 8.5 |
| 41051-1 | 6157 | −32.1 |
| 41302-1 | 6158 | −25.8 |
| 41301-1 | 6162 | −35.8 |
| 41052-1 | 6163 | −52.9 |
| 41053-1 | 6199 | −57.4 |
| 41054-1 | 6201 | −29.3 |
| 41055-1 | 6202 | −18.1 |
| 41056-1 | 6243 | −14.3 |
| 41057-1 | 6265 | −43.7 |
| 41058-1 | 6267 | −18.5 |
| 41059-1 | 6268 | −26.6 |
| 41060-1 | 6271 | −7.7 |
| 41061-1 | 6279 | −14.6 |
| 41062-1 | 6280 | −23.2 |
| 41063-1 | 6503 | −39.8 |
| 41064-1 | 6568 | 5.5 |
| 41065-1 | 6571 | −45.0 |
| 41066-1 | 6573 | −56.1 |
| 41067-1 | 6574 | 36.3 |
| 41068-1 | 6575 | −30.4 |
| 41069-1 | 6576 | −44.4 |
| 41070-1 | 6594 | −44.0 |
| 41300-1 | 6610 | −43.8 |
| 41299-1 | 6611 | −43.6 |
| 41298-1 | 6612 | −38.0 |
| 41297-1 | 6613 | −32.9 |
| 41296-1 | 6614 | −28.3 |
| 41295-1 | 6635 | −54.2 |
| 41294-1 | 6636 | −52.8 |
| 41293-1 | 6637 | −42.4 |
| 41292-1 | 6638 | −28.0 |
| 41291-1 | 6640 | −36.8 |
| 41290-1 | 6641 | −44.6 |
| 41289-1 | 6643 | −45.9 |
| 41288-1 | 6644 | −52.3 |
| 41287-1 | 6669 | −36.8 |
| 41286-1 | 6670 | −33.6 |
| 41285-1 | 6671 | −35.5 |
| 41284-1 | 6676 | −36.1 |
| 41283-1 | 6683 | −30.0 |
| 41282-1 | 6684 | −35.0 |
| 41281-1 | 6685 | −36.8 |
| 41280-1 | 6686 | −38.6 |

TABLE 5
RNA FISH Assay with Human/Marmoset PNPLA3 siRNA

| | PNPLA3 | PNPLA3 |
|---|---|---|
| Duplex No. | Location | Knockdown (%) |
| 41430-1 | 21 | −5.5 |
| 41429-1 | 22 | −2.6 |
| 41140-1 | 138 | 10.5 |
| 41428-1 | 142 | 21.1 |
| 41141-1 | 143 | 5.4 |
| 41427-1 | 257 | 7.3 |
| 41426-1 | 258 | −40.1 |
| 41425-1 | 262 | 57.8 |
| 41142-1 | 266 | −56.7 |
| 41143-1 | 269 | −4.0 |
| 41144-1 | 420 | 19.6 |
| 41145-1 | 422 | −55.4 |
| 41146-1 | 423 | −52.7 |
| 41147-1 | 424 | −30.1 |
| 41148-1 | 586 | 1.7 |
| 41149-1 | 714 | −57.8 |
| 41150-1 | 715 | −58.6 |
| 41151-1 | 716 | −39.0 |
| 41152-1 | 718 | −57.2 |
| 41153-1 | 721 | −54.6 |
| 41154-1 | 722 | −33.4 |
| 41155-1 | 723 | −52.9 |
| 41156-1 | 729 | −33.9 |
| 41157-1 | 730 | −36.7 |
| 41158-1 | 1136 | −25.9 |
| 41159-1 | 1137 | −32.9 |
| 41160-1 | 1162 | −28.0 |
| 41161-1 | 1858 | −53.3 |
| 41162-1 | 1860 | −62.0 |
| 41163-1 | 2187 | −59.0 |
| 41164-1 | 2189 | 20.4 |
| 41165-1 | 2190 | −17.9 |
| 41166-1 | 2191 | −39.5 |
| 41167-1 | 2193 | −7.6 |
| 41168-1 | 2267 | −29.3 |
| 41169-1 | 2268 | −36.5 |
| 41170-1 | 2269 | −48.3 |
| 41171-1 | 2273 | −49.3 |
| 41172-1 | 2274 | −4.2 |
| 41173-1 | 2639 | −32.2 |
| 41174-1 | 3893 | −61.4 |
| 41175-1 | 4112 | −57.5 |
| 41176-1 | 4113 | −54.6 |
| 41177-1 | 4115 | −41.7 |
| 41178-1 | 4116 | −63.4 |
| 41179-1 | 4117 | −66.1 |
| 41180-1 | 4118 | −30.0 |
| 41424-1 | 4119 | −57.0 |
| 41423-1 | 4160 | −15.6 |
| 41422-1 | 4441 | −26.4 |
| 41421-1 | 4983 | −33.6 |
| 41420-1 | 5707 | −38.5 |
| 41419-1 | 5770 | −37.0 |
| 41418-1 | 5771 | −43.1 |
| 41417-1 | 5772 | −20.6 |
| 41416-1 | 5773 | −24.5 |
| 41415-1 | 5774 | −31.6 |
| 41414-1 | 5819 | −47.9 |
| 41413-1 | 5820 | −51.7 |
| 41412-1 | 5822 | 35.8 |
| 41411-1 | 5823 | −27.5 |
| 41410-1 | 5824 | −38.3 |
| 41409-1 | 5857 | −24.8 |
| 41408-1 | 6601 | −38.2 |

### Example 3: Efficacy Screening of Select PNPLA3 siRNA Molecules in AAV-Based Mouse Models Containing Human PNPLA3 Sequences

[0184] Adeno-associated adenovirus (AAV; serotype AAVDJ8; endotoxin-free, prepared internally by Amgen) diluted in phosphate buffered saline (Thermo Fisher Scientific, 14190-136) was administered at 1×10¹² viral particles per animal into the tail vein of C57BL/6NCrl male or female mice (Charles River Laboratories Inc.) to drive expression of human PNPLA3 sequences in the liver. Four AAV constructs were designed from the ENST00000216180.7 PNPLA3 transcript for in vivo screening; one containing the full-length coding sequence for PNPLA3^{rs738409-rs738408} (AAV-CDS), and three enhanced green fluorescence protein (eGFP) reporter constructs containing stretches of the 3′ untranslated region (nucleotides (nt) 1620-3410 (AAV-A), nt 3310-5100 (AAV-B), and nt 5000-6689 (AAV-C). Each AAV construct also contained a benchmark sequence to compare siRNA-mediated knockdown efficacy across AAVs and studies.

[0185] GalNAc-conjugated siRNAs shown in FIG. 2 were tested against PNPLA3^{rs738409-rs738408}, AAV-A, AAV-B or AAV-C. FIG. 2 also shows the unmodified versions of these siRNA sequences. Two weeks after AAV injection, mice (generally 8-12 weeks of age and an n=3-4 animals per group) were treated with a single dose of siRNA via subcutaneous injection, at 0.5, 1.0, or 3.0 milligrams per kilogram of animal, diluted in phosphate buffered saline (Thermo Fisher Scientific, 14190-136). After 28 days post-siRNA injection, animals were euthanized, and livers were collected from the animals and snap-frozen in liquid nitrogen. A portion of the liver was processed for purified RNA using a QIACube Classic instrument (Qiagen, 9001292) and RNeasy Mini kits (Qiagen, 74106) according to manufacturer's instructions. Samples were analyzed using a NanoDropp™ 8000 Spectrophotometer (Thermo Scientific, ND-8000-GL). RNA was treated with RQ1 RNase-Free DNase (Promega, M6101) and prepared for Real-Time qPCR using the TAQMAN™ RNA-to-CT™ 1-Step kit (Applied Biosystems, 4392656). Real-Time qPCR was run on a QuantStudio Real-Time PCR machine. Results were based on gene expression of human PNPLA3 (Invitrogen, hs00228747_m1), GFP1 (IDT custom assay: Forward primer: CTATGTGCAGGAGAGAACCATC (Sense; SEQ ID NO: 3589), Reverse primer: GCCCTTCAGCTCGATTCTATT (AntiSense; SEQ ID NO: 3590), Probe: 5′-6FAM-TACAAGACCCGCGCTGAAGTCAAG TAMRA-3′ (Sense; SEQ ID NO: 3591)), GFP2 (IDT custom assay: Forward primer: TCATCTGCACCACTGGAAAG (Sense; SEQ ID NO: 3592), Reverse primer: CTGCTTCATATGGTCTGGGTATC (AntiSense; SEQ ID NO: 3593), Probe: 5′-6FAM CCAACACTGGTCACTACCCTCACC TAMRA-3′ (Sense; SEQ ID NO: 3594), and/or bovine growth hormone polyadenylation (BghpA, which is included in each AAV construct; IDT custom assay: Forward: 5′-GCCAGCCATCTGTTGT-3′ (SEQ ID NO: 3595), Reverse: 5′-GGAGTGGCACCTTCCA-3′ (SEQ ID NO: 3596), Probe: 5′-6FAM-TCCCCCGTGCCTTCCTTGACC TAMRA-3′ (SEQ ID NO: 3597), as normalized to mouse TATA-binding protein (Tbp) (IDT, Hex Mm.PT.39a.22214839), and presented as the relative percent knockdown of human PNPLA3, GFP, and/or BghpA mRNA expression, normalized to mouse Tbp, compared to vehicle-treated control animals. For some groups, another portion of the snap-frozen liver was homogenized in Pierce IP buffer (Thermo Scientific, 87787) including 1×HALT™ Protease and Phosphatase Inhibitor Cocktail (Thermo Scientific, 78441) to make a 50 mg tissue/ml lysis buffer solution. Protein concentrations were determined using a DIRECT DETECT™ infrared spectrometer (Millipore). GFP protein analysis was performed on a PEGGY SUE™ Simple Western System (Protein Simple, 004-800) using a 12-230 kDa PEGGY SUE or SALLY SUE Separation Module (Protein Simple, SM-S001), or a WES™ Simple Western System (Protein Simple, 004-600) using a 12-230 kDa Jess or Wes Separation Module, 8×25 capillary cartridges (Protein Simple, SM-W004). All R-actin protein detection was performed using the WES™ Simple Western System and components. The results of these experiments are shown FIG. 3 (AAV-CDS) and FIG. 4 (AAV-A, AAV-B, and AAV-C).

[0186] To evaluate relative percent knockdown of endogenous levels of the human PNPLA3 transcript by PNPLA3 siRNA molecules, a homozygous hPNPLA3^{I148M} knock-in (hPNPLA3^{I148M} KI) mouse model was used (developed by Amgen; colony maintained at Charles River Laboratories, Inc.). In this model, the wild type mouse Pnpla3 gene was replaced by the full-length coding region of the human PNPLA3^{I148M} gene while utilizing the mouse transcriptional regulatory promoter region to drive expression.

[0187] Single housed, male hPNPLA3^{I148M} KI mice, typically 8-10 weeks of age, were maintained on a standard chow diet ad libitum until the start of the study, at which point they were converted to a modified rodent obesity diet supplemented with hydrogenated vegetable oil, added fructose, and enriched with 0.2% added cholesterol (Envigo, TD.190883 or TD.200212; the latter is an irradiated version of the former). After two weeks on the diet, body weights were recorded, and the mice were randomized into groups of 5-6 mice based on even weight distribution. The mice were subcutaneously injected with a single dose of PNPLA3 siRNA molecules at 1 or 3 mg/kg of animal diluted in phosphate buffered saline (Thermo Fisher Scientific, 14190-136) or saline only. After 28 days post-treatment, mice were euthanized, and the livers collected from the animals and snap-frozen in liquid nitrogen. A portion of the liver was processed for purified RNA and for some groups a portion was processed for protein analysis.

[0188] Due to the relatively low endogenous expression of PNPLA3 transcript, mRNA analysis from KI mouse livers was prepared as described but analyzed by treating with a High-Capacity cDNA Reverse Transcription kit (Applied Biosystems, 4368813) and run on a QIAcuity Eight Platform Digital PCR System (Qiagen, 911056) which is more sensitive than traditional qPCR.

[0189] For targeted measurement of hPNPLA3 protein, approximately 100 to 200 mg of frozen liver tissue from each mouse was homogenized independently in cold PIERCE™ IP Lysis Buffer (Thermo Fisher, 87787). Samples were treated with 1×PIERCE™ Protease Inhibitor Tablets (Thermo Fisher, A32963) and BENZONASE® Nuclease (Millipore-Sigma, E1014). Human PNPLA3 protein (peptide: VSDGENVLVSDFR (SEQ ID NO: 3598); New England Peptide) was captured using immunoaffinity (IA) techniques and an anti-human PNPLA3 mAb (developed by Amgen Inc.), trypsin-digested on beads, and analyzed by liquid chromatography—with tandem mass spectrometry (LC-MS/MS; Thermo Fisher, Orbitrap FUSION™ LUMOS™ TRIBRID™ Mass Spectometer). Reagent-free LC MS/MS was used to measure mouse glyceraldehyde 3-phosphate dehydrogenase (mGAPDH; peptide: LISWYDNEYGYSNR (SEQ ID NO: 3599); New England Peptide), a housekeeping protein, in liver tissue recovered from each animal. The peptide signals across all samples were determined using the LC-MS data analysis software, ANALYST® (SCIEX, v1.6.2). The results of the knock-in experiments are shown in FIG. 5.

[0190] siRNA triggers that cluster within certain regions of the PNPLA3 coding sequence and demonstrated efficacy in vivo were selected for further investigation. Two selected siRNA molecules (“PNPLA3-T704_M1282_3G3-5′” (Duplex No. 43806-1) and “PNPLA3-T706-g.1g>a_M867_3G3-5′” (Duplex No. 41321-1) in FIG. 5) selectively target both human and cynomolgus PNPLA3 mRNA, while the other two selected siRNA molecules (“PNPLA3(Human-Only)-T1234_M867_3G3-5′” (Duplex No. 52317-1) and “PNPLA3 (Human-Only)-T1240_M867_3G3-5′” (Duplex No. 52307-1 in FIG. 5) target only human PNPLA3 mRNA. The sequences of the sense and antisense strands of each of the selected siRNA molecules is set forth in Table 6.

TABLE 6

| | | | Sense | Antisense | Sense | Antisense |
|---|---|---|---|---|---|---|
| | Duplex | PNPLA3 | SEQ ID NO: | SEQ ID NO: | SEQ ID NO: | SEQ ID NO: |
| siRNA | No. | Location | (Unmodified) | (Unmodified) | (Modified) | (Modified) |
| PNPLA3- | 43806-1 | 704 | 151 | 655 | 403 | 907 |
| T704_M1282_3G3-5′ | | | | | | |
| PNPLA3-T706-g.1g > | 41321-1 | 706 | 90 | 594 | 342 | 846 |
| a_M867_3G3-5′ | | | | | | |
| PNPLA3(Human-Only)- | 52317-1 | 1234 | 263 | 767 | 515 | 1019 |
| T1234_M867_3G3-5′ | | | | | | |
| PNPLA3(Human-Only)- | 52307-1 | 1240 | 253 | 757 | 505 | 1009 |
| T1240_M867_3G3-5 | | | | | | |

[0191] All publications, patents, and patent applications mentioned in this specification are herein incorporated by reference to the same extent as if each individual publication, patent, or patent application was specifically and individually indicated to be incorporated by reference. However, the citation of a reference herein should not be construed as an acknowledgement that such reference is prior art to the present invention. To the extent that any of the definitions or terms provided in the references incorporated by reference differ from the terms and discussion provided herein, the present terms and definitions control.

[0192] The foregoing written specification is considered to be sufficient to enable one skilled in the art to practice the invention. The foregoing description and examples detail certain preferred embodiments of the invention and describe the best mode contemplated by the inventors. It will be appreciated, however, that no matter how detailed the foregoing may appear in text, the invention may be practiced in many ways and the invention should be construed in accordance with the appended claims and any equivalents thereof.

The application's sequence listing, which the Patent Office published only in electronic form, follows.

SEQUENCE LISTING (3599 sequences)

SEQ ID NO: 1 - DNA, 23 bp, Homo sapiens
  source 1..23: mol_type = genomic DNA
ctgcaggtcctctcagatcttgt

SEQ ID NO: 2 - DNA, 23 bp, Homo sapiens
  source 1..23: mol_type = genomic DNA
gagagatatgccttcgaggatat

SEQ ID NO: 3 - DNA, 23 bp, Homo sapiens
  source 1..23: mol_type = genomic DNA
cgcggctggagcttgtccttcgc

SEQ ID NO: 4 - DNA, 23 bp, Homo sapiens
  source 1..23: mol_type = genomic DNA
agatatgccttcgaggatatttg

SEQ ID NO: 5 - DNA, 23 bp, Homo sapiens
  source 1..23: mol_type = genomic DNA
tgcaggtcctctcagatcttgtg

SEQ ID NO: 6 - DNA, 23 bp, Homo sapiens
  source 1..23: mol_type = genomic DNA
ggtccaaagacgaagtcgtggat

SEQ ID NO: 7 - DNA, 23 bp, Homo sapiens
  source 1..23: mol_type = genomic DNA
ccttctacagtggccttatccct

SEQ ID NO: 8 - DNA, 23 bp, Homo sapiens
  source 1..23: mol_type = genomic DNA
tttgcaacttgctacccattagg

SEQ ID NO: 9 - DNA, 23 bp, Homo sapiens
  source 1..23: mol_type = genomic DNA
gtgacaacgtacccttcattgat

SEQ ID NO: 10 - DNA, 23 bp, Homo sapiens
  source 1..23: mol_type = genomic DNA
cgacgcgcgcatgttgttcggcg

SEQ ID NO: 11 - DNA, 23 bp, Homo sapiens
  source 1..23: mol_type = genomic DNA
agatttgcaacttgctacccatt

SEQ ID NO: 12 - DNA, 23 bp, Homo sapiens
  source 1..23: mol_type = genomic DNA
gggagagatatgccttcgaggat

SEQ ID NO: 13 - DNA, 23 bp, Homo sapiens
  source 1..23: mol_type = genomic DNA
ctccttccttcagaggcgtgcga

SEQ ID NO: 14 - DNA, 23 bp, Homo sapiens
  source 1..23: mol_type = genomic DNA
tgacaacgtacccttcattgatg

SEQ ID NO: 15 - DNA, 23 bp, Homo sapiens
  source 1..23: mol_type = genomic DNA
gacaacgtacccttcattgatgc

SEQ ID NO: 16 - DNA, 23 bp, Homo sapiens
  source 1..23: mol_type = genomic DNA
tacgacatctgccctaaagtcaa

SEQ ID NO: 17 - DNA, 23 bp, Homo sapiens
  source 1..23: mol_type = genomic DNA
acttgctacccattaggataatg

SEQ ID NO: 18 - DNA, 23 bp, Homo sapiens
  source 1..23: mol_type = genomic DNA
ctatggggagtacgacatctgcc

SEQ ID NO: 19 - DNA, 23 bp, Homo sapiens
  source 1..23: mol_type = genomic DNA
tggaatctgccattgcgattgtc

SEQ ID NO: 20 - DNA, 23 bp, Homo sapiens
  source 1..23: mol_type = genomic DNA
acgacatctgccctaaagtcaag

SEQ ID NO: 21 - DNA, 23 bp, Homo sapiens
  source 1..23: mol_type = genomic DNA
tatgccttcgaggatatttggat

SEQ ID NO: 22 - DNA, 23 bp, Homo sapiens
  source 1..23: mol_type = genomic DNA
tgagctgctagaccacctgcgtc

SEQ ID NO: 23 - DNA, 23 bp, Homo sapiens
  source 1..23: mol_type = genomic DNA
gcaacttgctacccattaggata

SEQ ID NO: 24 - DNA, 23 bp, Homo sapiens
  source 1..23: mol_type = genomic DNA
caacttgctacccattaggataa

SEQ ID NO: 25 - DNA, 23 bp, Homo sapiens
  source 1..23: mol_type = genomic DNA
tgcactgcgtcggcgtcctctcc

SEQ ID NO: 26 - DNA, 23 bp, Homo sapiens
  source 1..23: mol_type = genomic DNA
agcttgtccttcgcgggctgcgg

SEQ ID NO: 27 - DNA, 23 bp, Homo sapiens
  source 1..23: mol_type = genomic DNA
ttccagatatgcccgacgatgtc

SEQ ID NO: 28 - DNA, 23 bp, Homo sapiens
  source 1..23: mol_type = genomic DNA
gatggggaaaacgttctggtgtc

SEQ ID NO: 29 - DNA, 23 bp, Homo sapiens
  source 1..23: mol_type = genomic DNA
atggggaaaacgttctggtgtct

SEQ ID NO: 30 - DNA, 23 bp, Homo sapiens
  source 1..23: mol_type = genomic DNA
ccccggatctcaaggtgctggga

SEQ ID NO: 31 - DNA, 23 bp, Homo sapiens
  source 1..23: mol_type = genomic DNA
tcagaggcgtgcgatatgtggat

SEQ ID NO: 32 - DNA, 23 bp, Homo sapiens
  source 1..23: mol_type = genomic DNA
cgcctctgcacagggaacctcta

SEQ ID NO: 33 - DNA, 23 bp, Homo sapiens
  source 1..23: mol_type = genomic DNA
cgacatctgccctaaagtcaagt

SEQ ID NO: 34 - DNA, 23 bp, Homo sapiens
  source 1..23: mol_type = genomic DNA
ggtggatacatgagcaagatttg

SEQ ID NO: 35 - DNA, 23 bp, Homo sapiens
  source 1..23: mol_type = genomic DNA
agcaagatttgcaacttgctacc

SEQ ID NO: 36 - DNA, 23 bp, Homo sapiens
  source 1..23: mol_type = genomic DNA
tgctgggagagatatgccttcga

SEQ ID NO: 37 - DNA, 23 bp, Homo sapiens
  source 1..23: mol_type = genomic DNA
gtccagagactggtgacatggct

SEQ ID NO: 38 - DNA, 23 bp, Homo sapiens
  source 1..23: mol_type = genomic DNA
gaaaacgttctggtgtctgactt

SEQ ID NO: 39 - DNA, 23 bp, Homo sapiens
  source 1..23: mol_type = genomic DNA
ttcggtccaaagacgaagtcgtg

SEQ ID NO: 40 - DNA, 23 bp, Homo sapiens
  source 1..23: mol_type = genomic DNA
atttgcaacttgctacccattag

SEQ ID NO: 41 - DNA, 23 bp, Homo sapiens
  source 1..23: mol_type = genomic DNA
gagtgagtgacaacgtacccttc

SEQ ID NO: 42 - DNA, 23 bp, Homo sapiens
  source 1..23: mol_type = genomic DNA
gctgggagagatatgccttcgag

SEQ ID NO: 43 - DNA, 23 bp, Homo sapiens
  source 1..23: mol_type = genomic DNA
ctgggagagatatgccttcgagg

SEQ ID NO: 44 - DNA, 23 bp, Homo sapiens
  source 1..23: mol_type = genomic DNA
atgaaagacaaaggtggatacat

SEQ ID NO: 45 - DNA, 23 bp, Homo sapiens
  source 1..23: mol_type = genomic DNA
tgagtgacaacgtacccttcatt

SEQ ID NO: 46 - DNA, 23 bp, Homo sapiens
  source 1..23: mol_type = genomic DNA
ctccacctttcccagtttttcac

SEQ ID NO: 47 - DNA, 23 bp, Homo sapiens
  source 1..23: mol_type = genomic DNA
tccacctttcccagtttttcact

SEQ ID NO: 48 - DNA, 23 bp, Homo sapiens
  source 1..23: mol_type = genomic DNA
agtacgacatctgccctaaagtc

SEQ ID NO: 49 - DNA, 23 bp, Homo sapiens
  source 1..23: mol_type = genomic DNA
agaacacctttttcacctaacta

SEQ ID NO: 50 - DNA, 23 bp, Homo sapiens
  source 1..23: mol_type = genomic DNA
cctctgagctgagttggttttat

SEQ ID NO: 51 - DNA, 23 bp, Homo sapiens
  source 1..23: mol_type = genomic DNA
ctgagctgagttggttttatgaa

SEQ ID NO: 52 - DNA, 23 bp, Homo sapiens
  source 1..23: mol_type = genomic DNA
tgagctgagttggttttatgaaa

SEQ ID NO: 53 - DNA, 23 bp, Homo sapiens
  source 1..23: mol_type = genomic DNA
agttggttttatgaaaagctagg

SEQ ID NO: 54 - DNA, 23 bp, Homo sapiens
  source 1..23: mol_type = genomic DNA
tgcagagggtcccttactgactg

SEQ ID NO: 55 - DNA, 23 bp, Homo sapiens
  source 1..23: mol_type = genomic DNA
gaacacctttttcacctaactaa

SEQ ID NO: 56 - DNA, 23 bp, Homo sapiens
  source 1..23: mol_type = genomic DNA
aacacctttttcacctaactaaa

SEQ ID NO: 57 - DNA, 23 bp, Homo sapiens
  source 1..23: mol_type = genomic DNA
acacctttttcacctaactaaaa

SEQ ID NO: 58 - DNA, 23 bp, Homo sapiens
  source 1..23: mol_type = genomic DNA
cacctttttcacctaactaaaat

SEQ ID NO: 59 - DNA, 23 bp, Homo sapiens
  source 1..23: mol_type = genomic DNA
acctttttcacctaactaaaata

SEQ ID NO: 60 - DNA, 23 bp, Homo sapiens
  source 1..23: mol_type = genomic DNA
ctttttcacctaactaaaataat

SEQ ID NO: 61 - RNA, 21 nt, synthetic construct
  source 1..21: mol_type = other RNA
ggccttatccctccttcctta

SEQ ID NO: 62 - RNA, 21 nt, synthetic construct
  source 1..21: mol_type = other RNA
acatctgccctaaagtcaagn

SEQ ID NO: 63 - RNA, 21 nt, synthetic construct
  source 1..21: mol_type = other RNA
cctctgcacagggaacctctn

SEQ ID NO: 64 - RNA, 21 nt, synthetic construct
  source 1..21: mol_type = other RNA
cttgtccttcgcgggctgcgn

SEQ ID NO: 65 - RNA, 21 nt, synthetic construct
  source 1..21: mol_type = other RNA
agctgctagaccacctgcgtn

SEQ ID NO: 66 - RNA, 21 nt, synthetic construct
  source 1..21: mol_type = other RNA
tgccttcgaggatatttggan

SEQ ID NO: 67 - RNA, 21 nt, synthetic construct
  source 1..21: mol_type = other RNA
tgccttcgaggatatttggan

SEQ ID NO: 68 - RNA, 21 nt, synthetic construct
  source 1..21: mol_type = other RNA
gacatctgccctaaagtcaan

SEQ ID NO: 69 - RNA, 21 nt, synthetic construct
  source 1..21: mol_type = other RNA
cgacatctgccctaaagtcan

SEQ ID NO: 70 - RNA, 21 nt, synthetic construct
  source 1..21: mol_type = other RNA
gagagatatgccttcgaggan

SEQ ID NO: 71 - RNA, 21 nt, synthetic construct
  source 1..21: mol_type = other RNA
atttgcaacttgctacccatn

SEQ ID NO: 72 - RNA, 21 nt, synthetic construct
  source 1..21: mol_type = other RNA
acgcgcgcatgttgttcggcn

SEQ ID NO: 73 - RNA, 21 nt, synthetic construct
  source 1..21: mol_type = other RNA
tgcaacttgctacccattagn

SEQ ID NO: 74 - RNA, 21 nt, synthetic construct
  source 1..21: mol_type = other RNA
atatgccttcgaggatatttn

SEQ ID NO: 75 - RNA, 21 nt, synthetic construct
  source 1..21: mol_type = other RNA
cggctggagcttgtccttcgn

SEQ ID NO: 76 - RNA, 21 nt, synthetic construct
  source 1..21: mol_type = other RNA
gagatatgccttcgaggatan

SEQ ID NO: 77 - RNA, 21 nt, synthetic construct
  source 1..21: mol_type = other RNA
tacgacatctgccctaaagtn

SEQ ID NO: 78 - RNA, 21 nt, synthetic construct
  source 1..21: mol_type = other RNA
gaaagacaaaggtggatacan

SEQ ID NO: 79 - RNA, 21 nt, synthetic construct
  source 1..21: mol_type = other RNA
gggagagatatgccttcgagn

SEQ ID NO: 80 - RNA, 21 nt, synthetic construct
  source 1..21: mol_type = other RNA
tgggagagatatgccttcgan

SEQ ID NO: 81 - RNA, 21 nt, synthetic construct
  source 1..21: mol_type = other RNA
ttgcaacttgctacccattan

SEQ ID NO: 82 - RNA, 21 nt, synthetic construct
  source 1..21: mol_type = other RNA
ctgggagagatatgccttcgn

SEQ ID NO: 83 - RNA, 21 nt, synthetic construct
  source 1..21: mol_type = other RNA
caagatttgcaacttgctacn

SEQ ID NO: 84 - RNA, 21 nt, synthetic construct
  source 1..21: mol_type = other RNA
tggatacatgagcaagatttn

SEQ ID NO: 85 - RNA, 21 nt, synthetic construct
  source 1..21: mol_type = other RNA
ccggatctcaaggtgctgggn

SEQ ID NO: 86 - RNA, 21 nt, synthetic construct
  source 1..21: mol_type = other RNA
cactgcgtcggcgtcctctcn

SEQ ID NO: 87 - RNA, 21 nt, synthetic construct
  source 1..21: mol_type = other RNA
acttgctacccattaggatan

SEQ ID NO: 88 - RNA, 21 nt, synthetic construct
  source 1..21: mol_type = other RNA
aacttgctacccattaggatn

SEQ ID NO: 89 - RNA, 21 nt, synthetic construct
  source 1..21: mol_type = other RNA
atggggagtacgacatctgcn

SEQ ID NO: 90 - RNA, 21 nt, synthetic construct
  source 1..21: mol_type = other RNA
caacgtacccttcattgatgn

SEQ ID NO: 91 - RNA, 21 nt, synthetic construct
  source 1..21: mol_type = other RNA
caacgtacccttcattgatgn

SEQ ID NO: 92 - RNA, 21 nt, synthetic construct
  source 1..21: mol_type = other RNA
acaacgtacccttcattgatn

SEQ ID NO: 93 - RNA, 21 nt, synthetic construct
  source 1..21: mol_type = other RNA
ccttccttcagaggcgtgcgn

SEQ ID NO: 94 - RNA, 21 nt, synthetic construct
  source 1..21: mol_type = other RNA
gacaacgtacccttcattgan

SEQ ID NO: 95 - RNA, 21 nt, synthetic construct
  source 1..21: mol_type = other RNA
ttctacagtggccttatcccn

SEQ ID NO: 96 - RNA, 21 nt, synthetic construct
  source 1..21: mol_type = other RNA
tccaaagacgaagtcgtggan

SEQ ID NO: 97 - RNA, 21 nt, synthetic construct
  source 1..21: mol_type = other RNA
caggtcctctcagatcttgtn

SEQ ID NO: 98 - RNA, 21 nt, synthetic construct
  source 1..21: mol_type = other RNA
caggtcctctcagatcttgtn

SEQ ID NO: 99 - RNA, 21 nt, synthetic construct
  source 1..21: mol_type = other RNA
gcaggtcctctcagatcttgn

SEQ ID NO: 100 - RNA, 21 nt, synthetic construct
  source 1..21: mol_type = other RNA
cacctttcccagtttttcacn

SEQ ID NO: 101 - RNA, 21 nt, synthetic construct
  source 1..21: mol_type = other RNA
ccacctttcccagtttttcan

SEQ ID NO: 102 - RNA, 21 nt, synthetic construct
  source 1..21: mol_type = other RNA
agtgacaacgtacccttcatn

SEQ ID NO: 103 - RNA, 21 nt, synthetic construct
  source 1..21: mol_type = other RNA
gtgagtgacaacgtacccttn

SEQ ID NO: 104 - RNA, 21 nt, synthetic construct
  source 1..21: mol_type = other RNA
gtgagtgacaacgtacccttn

SEQ ID NO: 105 - RNA, 21 nt, synthetic construct
  source 1..21: mol_type = other RNA
cggtccaaagacgaagtcgtn

SEQ ID NO: 106 - RNA, 21 nt, synthetic construct
  source 1..21: mol_type = other RNA
aaacgttctggtgtctgactn

SEQ ID NO: 107 - RNA, 21 nt, synthetic construct
  source 1..21: mol_type = other RNA
ccagagactggtgacatggcn

SEQ ID NO: 108 - RNA, 21 nt, synthetic construct
  source 1..21: mol_type = other RNA
agaggcgtgcgatatgtggan

SEQ ID NO: 109 - RNA, 21 nt, synthetic construct
  source 1..21: mol_type = other RNA
ggggaaaacgttctggtgtcn

SEQ ID NO: 110 - RNA, 21 nt, synthetic construct
  source 1..21: mol_type = other RNA
tggggaaaacgttctggtgtn

SEQ ID NO: 111 - RNA, 21 nt, synthetic construct
  source 1..21: mol_type = other RNA
tggggaaaacgttctggtgtn

SEQ ID NO: 112 - RNA, 21 nt, synthetic construct
  source 1..21: mol_type = other RNA
ccagatatgcccgacgatgtn

SEQ ID NO: 113 - RNA, 21 nt, synthetic construct
  source 1..21: mol_type = other RNA
gaatctgccattgcgattgtn

SEQ ID NO: 114 - RNA, 21 nt, synthetic construct
  source 1..21: mol_type = other RNA
ttgctacccattaggataatn

SEQ ID NO: 115 - RNA, 21 nt, synthetic construct
  source 1..21: mol_type = other RNA
aacacctttttcacctaactn

SEQ ID NO: 116 - RNA, 21 nt, synthetic construct
  source 1..21: mol_type = other RNA
tctgagctgagttggttttan

SEQ ID NO: 117 - RNA, 21 nt, synthetic construct
  source 1..21: mol_type = other RNA
gagctgagttggttttatgan

SEQ ID NO: 118 - RNA, 21 nt, synthetic construct
  source 1..21: mol_type = other RNA
agctgagttggttttatgaan

SEQ ID NO: 119 - RNA, 21 nt, synthetic construct
  source 1..21: mol_type = other RNA
ttggttttatgaaaagctagn

SEQ ID NO: 120 - RNA, 21 nt, synthetic construct
  source 1..21: mol_type = other RNA
cagagggtcccttactgactn

SEQ ID NO: 121 - RNA, 21 nt, synthetic construct
  source 1..21: mol_type = other RNA
acacctttttcacctaactan

SEQ ID NO: 122 - RNA, 21 nt, synthetic construct
  source 1..21: mol_type = other RNA
cacctttttcacctaactaan

SEQ ID NO: 123 - RNA, 21 nt, synthetic construct
  source 1..21: mol_type = other RNA
acctttttcacctaactaaan

SEQ ID NO: 124 - RNA, 21 nt, synthetic construct
  source 1..21: mol_type = other RNA
cctttttcacctaactaaaan

SEQ ID NO: 125 - RNA, 21 nt, synthetic construct
  source 1..21: mol_type = other RNA
ctttttcacctaactaaaatn

SEQ ID NO: 126 - RNA, 21 nt, synthetic construct
  source 1..21: mol_type = other RNA
ttttcacctaactaaaataan

SEQ ID NO: 127 - RNA, 21 nt, synthetic construct
  source 1..21: mol_type = other RNA
gacatctgccctaaagtcaan

SEQ ID NO: 128 - RNA, 21 nt, synthetic construct
  source 1..21: mol_type = other RNA
gaatctgccattgcgattgtn

SEQ ID NO: 129 - RNA, 21 nt, synthetic construct
  source 1..21: mol_type = other RNA
gaatctgccattgcgattgtn

SEQ ID NO: 130 - RNA, 21 nt, synthetic construct
  source 1..21: mol_type = other RNA
caacgtacccttcattgatgn

SEQ ID NO: 131 - RNA, 21 nt, synthetic construct
  source 1..21: mol_type = other RNA
caacgtacccttcattgatgn

SEQ ID NO: 132 - RNA, 21 nt, synthetic construct
  source 1..21: mol_type = other RNA
gacaacgtacccttcattgan

SEQ ID NO: 133 - RNA, 21 nt, synthetic construct
  source 1..21: mol_type = other RNA
cggctggagcttgtccttcgn

SEQ ID NO: 134 - RNA, 21 nt, synthetic construct
  source 1..21: mol_type = other RNA
catctgccctaaagtcaattn

SEQ ID NO: 135 - RNA, 21 nt, synthetic construct
  source 1..21: mol_type = other RNA
gtctgccattgcgattgtttn

SEQ ID NO: 136 - RNA, 21 nt, synthetic construct
  source 1..21: mol_type = other RNA
gcgtacccttcattgatgttn

SEQ ID NO: 137 - RNA, 21 nt, synthetic construct
  source 1..21: mol_type = other RNA
caacgtacccttcattgattn

SEQ ID NO: 138 - RNA, 21 nt, synthetic construct
  source 1..21: mol_type = other RNA
gctggagcttgtccttcgttn

SEQ ID NO: 139 - RNA, 21 nt, synthetic construct
  source 1..21: mol_type = other RNA
gacatctgccctaaagtcaan

SEQ ID NO: 140 - RNA, 21 nt, synthetic construct
  source 1..21: mol_type = other RNA
gaatctgccattgcgattgtn

SEQ ID NO: 141 - RNA, 21 nt, synthetic construct
  source 1..21: mol_type = other RNA
caacgtacccttcattgatgn

SEQ ID NO: 142 - RNA, 21 nt, synthetic construct
  source 1..21: mol_type = other RNA
gacaacgtacccttcattgan

SEQ ID NO: 143 - RNA, 21 nt, synthetic construct
  source 1..21: mol_type = other RNA
cggctggagcttgtccttcgn

SEQ ID NO: 144 - RNA, 21 nt, synthetic construct
  source 1..21: mol_type = other RNA
gacatctgccctaaagtcaan

SEQ ID NO: 145 - RNA, 21 nt, synthetic construct
  source 1..21: mol_type = other RNA
gaatctgccattgcgattgtn

SEQ ID NO: 146 - RNA, 21 nt, synthetic construct
  source 1..21: mol_type = other RNA
gacaacgtacccttcattgan

SEQ ID NO: 147 - RNA, 21 nt, synthetic construct
  source 1..21: mol_type = other RNA
cggctggagcttgtccttcgn

SEQ ID NO: 148 - RNA, 21 nt, synthetic construct
  source 1..21: mol_type = other RNA
catctgccctaaagtcaattn

SEQ ID NO: 149 - RNA, 21 nt, synthetic construct
  source 1..21: mol_type = other RNA
gtctgccattgcgattgtttn

SEQ ID NO: 150 - RNA, 21 nt, synthetic construct
  source 1..21: mol_type = other RNA
gcgtacccttcattgatgttn

SEQ ID NO: 151 - RNA, 21 nt, synthetic construct
  source 1..21: mol_type = other RNA
caacgtacccttcattgattn

SEQ ID NO: 152 - RNA, 21 nt, synthetic construct
  source 1..21: mol_type = other RNA
caacgtacccttcattgattn

SEQ ID NO: 153 - RNA, 21 nt, synthetic construct
  source 1..21: mol_type = other RNA
gctggagcttgtccttcgttn

SEQ ID NO: 154 - RNA, 21 nt, synthetic construct
  source 1..21: mol_type = other RNA
gacatctgccctaaagtcaan

SEQ ID NO: 155 - RNA, 21 nt, synthetic construct
  source 1..21: mol_type = other RNA
gacatctgccctaaagtcaan

SEQ ID NO: 156 - RNA, 21 nt, synthetic construct
  source 1..21: mol_type = other RNA
gaatctgccattgcgattgtn

SEQ ID NO: 157 - RNA, 21 nt, synthetic construct
  source 1..21: mol_type = other RNA
caacgtacccttcattgatgn

SEQ ID NO: 158 - RNA, 21 nt, synthetic construct
  source 1..21: mol_type = other RNA
gacaacgtacccttcattgan

SEQ ID NO: 159 - RNA, 21 nt, synthetic construct
  source 1..21: mol_type = other RNA
cggctggagcttgtccttcgn

SEQ ID NO: 160 - RNA, 19 nt, synthetic construct
  source 1..19: mol_type = other RNA
caacgtacccttcattgan

SEQ ID NO: 161 - RNA, 19 nt, synthetic construct
  source 1..19: mol_type = other RNA
caacgtacccttcattgan

SEQ ID NO: 162 - RNA, 21 nt, synthetic construct
  source 1..21: mol_type = other RNA
cgagtgctgatgtgtctgctn

SEQ ID NO: 163 - RNA, 21 nt, synthetic construct
  source 1..21: mol_type = other RNA
aaatgaaagacaaaggtggan

SEQ ID NO: 164 - RNA, 21 nt, synthetic construct
  source 1..21: mol_type = other RNA
gaaatgaaagacaaaggtggn

SEQ ID NO: 165 - RNA, 21 nt, synthetic construct
  source 1..21: mol_type = other RNA
cacgaactttcttcatgtggn

SEQ ID NO: 166 - RNA, 21 nt, synthetic construct
  source 1..21: mol_type = other RNA
ttcttgggcaataaagtaccn

SEQ ID NO: 167 - RNA, 21 nt, synthetic construct
  source 1..21: mol_type = other RNA
ttcttgggcaataaagtaccn

SEQ ID NO: 168 - RNA, 21 nt, synthetic construct
  source 1..21: mol_type = other RNA
ttcttgggcaataaagtaccn

SEQ ID NO: 169 - RNA, 21 nt, synthetic construct
  source 1..21: mol_type = other RNA
gggaacctctaccttctctcn

SEQ ID NO: 170 - RNA, 21 nt, synthetic construct
  source 1..21: mol_type = other RNA
gagtgagtgacaacgtacccn

SEQ ID NO: 171 - RNA, 21 nt, synthetic construct
  source 1..21: mol_type = other RNA
cgttctggtgtctgactttcn

SEQ ID NO: 172 - RNA, 21 nt, synthetic construct
  source 1..21: mol_type = other RNA
ggagtgagtgacaacgtaccn

SEQ ID NO: 173 - RNA, 21 nt, synthetic construct
  source 1..21: mol_type = other RNA
cttgggcaataaagtacctgn

SEQ ID NO: 174 - RNA, 21 nt, synthetic construct
  source 1..21: mol_type = other RNA
tatatcaaaacccttatggcn

SEQ ID NO: 175 - RNA, 21 nt, synthetic construct
  source 1..21: mol_type = other RNA
aattttgtattatgtgaatcn

SEQ ID NO: 176 - RNA, 21 nt, synthetic construct
  source 1..21: mol_type = other RNA
tgttgaattttgtattatgtn

SEQ ID NO: 177 - RNA, 21 nt, synthetic construct
  source 1..21: mol_type = other RNA
tttcagcatgagaaaataacn

SEQ ID NO: 178 - RNA, 21 nt, synthetic construct
  source 1..21: mol_type = other RNA
acagaccctttaaaggaaacn

SEQ ID NO: 179 - RNA, 21 nt, synthetic construct
  source 1..21: mol_type = other RNA
ggttgggaaatgacaccaggn

SEQ ID NO: 180 - RNA, 21 nt, synthetic construct
  source 1..21: mol_type = other RNA
ctggttgggaaatgacaccan

SEQ ID NO: 181 - RNA, 21 nt, synthetic construct
  source 1..21: mol_type = other RNA
ctaccatgcctggtccaacan

SEQ ID NO: 182 - RNA, 21 nt, synthetic construct
  source 1..21: mol_type = other RNA
tcttcctgaaccacctctggn

SEQ ID NO: 183 - RNA, 21 nt, synthetic construct
  source 1..21: mol_type = other RNA
tatgtgttgcccaagtttctn

SEQ ID NO: 184 - RNA, 21 nt, synthetic construct
  source 1..21: mol_type = other RNA
gagaagacagaccctttaaan

SEQ ID NO: 185 - RNA, 21 nt, synthetic construct
  source 1..21: mol_type = other RNA
tgtgttgcccaagtttctatn

SEQ ID NO: 186 - RNA, 21 nt, synthetic construct
  source 1..21: mol_type = other RNA
actctcaggaataatcagtan

SEQ ID NO: 187 - RNA, 21 nt, synthetic construct
  source 1..21: mol_type = other RNA
attggcctatgaatgcattcn

SEQ ID NO: 188 - RNA, 21 nt, synthetic construct
  source 1..21: mol_type = other RNA
gtgattgttatcaggaaaaan

SEQ ID NO: 189 - RNA, 21 nt, synthetic construct
  source 1..21: mol_type = other RNA
aaggaaatcaggaagtgtaan

SEQ ID NO: 190 - RNA, 21 nt, synthetic construct
  source 1..21: mol_type = other RNA
agtgagttcccaaggcctctn

SEQ ID NO: 191 - RNA, 21 nt, synthetic construct
  source 1..21: mol_type = other RNA
ggttctagggacaaactctan

SEQ ID NO: 192 - RNA, 21 nt, synthetic construct
  source 1..21: mol_type = other RNA
ggttctagggacaaactctan

SEQ ID NO: 193 - RNA, 21 nt, synthetic construct
  source 1..21: mol_type = other RNA
caagtttcttttcccaagttn

SEQ ID NO: 194 - RNA, 21 nt, synthetic construct
  source 1..21: mol_type = other RNA
aggaaacgggttctagggacn

SEQ ID NO: 195 - RNA, 21 nt, synthetic construct
  source 1..21: mol_type = other RNA
ctggtccaacattcttcattn

SEQ ID NO: 196 - RNA, 21 nt, synthetic construct
  source 1..21: mol_type = other RNA
ctccttgcatcttctcattcn

SEQ ID NO: 197 - RNA, 21 nt, synthetic construct
  source 1..21: mol_type = other RNA
ggccctattaatggtcagacn

SEQ ID NO: 198 - RNA, 21 nt, synthetic construct
  source 1..21: mol_type = other RNA
attctttcagaggtgctaaan

SEQ ID NO: 199 - RNA, 21 nt, synthetic construct
  source 1..21: mol_type = other RNA
agtgctgatgtgtctgctttn

SEQ ID NO: 200 - RNA, 21 nt, synthetic construct
  source 1..21: mol_type = other RNA
aatgaaagacaaaggtggatn

SEQ ID NO: 201 - RNA, 21 nt, synthetic construct
  source 1..21: mol_type = other RNA
cttgggcaataaagtaccttn

SEQ ID NO: 202 - RNA, 21 nt, synthetic construct
  source 1..21: mol_type = other RNA
agtgagtgacaacgtaccttn

SEQ ID NO: 203 - RNA, 21 nt, synthetic construct
  source 1..21: mol_type = other RNA
agtgctgatgtgtctgctttn

SEQ ID NO: 204 - RNA, 21 nt, synthetic construct
  source 1..21: mol_type = other RNA
aatgaaagacaaaggtggatn

SEQ ID NO: 205 - RNA, 21 nt, synthetic construct
  source 1..21: mol_type = other RNA
cttgggcaataaagtaccttn

SEQ ID NO: 206 - RNA, 21 nt, synthetic construct
  source 1..21: mol_type = other RNA
agtgagtgacaacgtaccttn

SEQ ID NO: 207 - RNA, 21 nt, synthetic construct
  source 1..21: mol_type = other RNA
cgagtgctgatgtgtctgctn

SEQ ID NO: 208 - RNA, 21 nt, synthetic construct
  source 1..21: mol_type = other RNA
gaaatgaaagacaaaggtggn

SEQ ID NO: 209 - RNA, 21 nt, synthetic construct
  source 1..21: mol_type = other RNA
ttcttgggcaataaagtaccn

SEQ ID NO: 210 - RNA, 21 nt, synthetic construct
  source 1..21: mol_type = other RNA
ggagtgagtgacaacgtaccn

SEQ ID NO: 211 - RNA, 21 nt, synthetic construct
  source 1..21: mol_type = other RNA
cgagtgctgatgtgtctgctn

SEQ ID NO: 212 - RNA, 21 nt, synthetic construct
  source 1..21: mol_type = other RNA
gaaatgaaagacaaaggtggn

SEQ ID NO: 213 - RNA, 21 nt, synthetic construct
  source 1..21: mol_type = other RNA
ttcttgggcaataaagtaccn

SEQ ID NO: 214 - RNA, 21 nt, synthetic construct
  source 1..21: mol_type = other RNA
ggagtgagtgacaacgtaccn

SEQ ID NO: 215 - RNA, 21 nt, synthetic construct
  source 1..21: mol_type = other RNA
agtgctgatgtgtctgctttn

SEQ ID NO: 216 - RNA, 21 nt, synthetic construct
  source 1..21: mol_type = other RNA
aatgaaagacaaaggtggatn

SEQ ID NO: 217 - RNA, 21 nt, synthetic construct
  source 1..21: mol_type = other RNA
cttgggcaataaagtaccttn

SEQ ID NO: 218 - RNA, 21 nt, synthetic construct
  source 1..21: mol_type = other RNA
agtgagtgacaacgtaccttn

SEQ ID NO: 219 - RNA, 21 nt, synthetic construct
  source 1..21: mol_type = other RNA
agtgctgatgtgtctgctttn

SEQ ID NO: 220 - RNA, 21 nt, synthetic construct
  source 1..21: mol_type = other RNA
aatgaaagacaaaggtggatn

SEQ ID NO: 221 - RNA, 21 nt, synthetic construct
  source 1..21: mol_type = other RNA
cttgggcaataaagtaccttn

SEQ ID NO: 222 - RNA, 21 nt, synthetic construct
  source 1..21: mol_type = other RNA
agtgagtgacaacgtaccttn

SEQ ID NO: 223 - RNA, 21 nt, synthetic construct
  source 1..21: mol_type = other RNA
gcagactgttatttgtaattn

SEQ ID NO: 224 - RNA, 21 nt, synthetic construct
  source 1..21: mol_type = other RNA
gttgaattttgtattatgtgn

SEQ ID NO: 225 - RNA, 21 nt, synthetic construct
  source 1..21: mol_type = other RNA
cccaagtttctatggtgaacn

SEQ ID NO: 226 - RNA, 21 nt, synthetic construct
  source 1..21: mol_type = other RNA
ttaattttagaacaccttttn

SEQ ID NO: 227 - RNA, 21 nt, synthetic construct
  source 1..21: mol_type = other RNA
agacagaccctttaaaggaan

SEQ ID NO: 228 - RNA, 21 nt, synthetic construct
  source 1..21: mol_type = other RNA
aagacagaccctttaaaggan

SEQ ID NO: 229 - RNA, 21 nt, synthetic construct
  source 1..21: mol_type = other RNA
tgagaagacagaccctttaan

SEQ ID NO: 230 - RNA, 21 nt, synthetic construct
  source 1..21: mol_type = other RNA
ttttccccaggtgtgataatn

SEQ ID NO: 231 - RNA, 21 nt, synthetic construct
  source 1..21: mol_type = other RNA
ggacgtattttctttctgctn

SEQ ID NO: 232 - RNA, 21 nt, synthetic construct
  source 1..21: mol_type = other RNA
ggacgtattttctttctgctn

SEQ ID NO: 233 - RNA, 21 nt, synthetic construct
  source 1..21: mol_type = other RNA
cctgccttcttacatcttgan

SEQ ID NO: 234 - RNA, 21 nt, synthetic construct
  source 1..21: mol_type = other RNA
aaggcaccctttgcttaggcn

SEQ ID NO: 235 - RNA, 21 nt, synthetic construct
  source 1..21: mol_type = other RNA
ctttgagaaaagaggctactn

SEQ ID NO: 236 - RNA, 21 nt, synthetic construct
  source 1..21: mol_type = other RNA
ttgatggagacaagcccttgn

SEQ ID NO: 237 - RNA, 21 nt, synthetic construct
  source 1..21: mol_type = other RNA
ttgatggagacaagcccttgn

SEQ ID NO: 238 - RNA, 21 nt, synthetic construct
  source 1..21: mol_type = other RNA
cttgatggagacaagcccttn

SEQ ID NO: 239 - RNA, 21 nt, synthetic construct
  source 1..21: mol_type = other RNA
cttgatggagacaagcccttn

SEQ ID NO: 240 - RNA, 21 nt, synthetic construct
  source 1..21: mol_type = other RNA
ttcttttcccaagtttcccan

SEQ ID NO: 241 - RNA, 21 nt, synthetic construct
  source 1..21: mol_type = other RNA
agttcccaaggcctctgttcn

SEQ ID NO: 242 - RNA, 21 nt, synthetic construct
  source 1..21: mol_type = other RNA
taaggaaatcaggaagtgtan

SEQ ID NO: 243 - RNA, 21 nt, synthetic construct
  source 1..21: mol_type = other RNA
ctctgatcaccccaacctctn

SEQ ID NO: 244 - RNA, 21 nt, synthetic construct
  source 1..21: mol_type = other RNA
ctccagaaggcaccctttgcn

SEQ ID NO: 245 - RNA, 21 nt, synthetic construct
  source 1..21: mol_type = other RNA
ttagtgcagagtatgagcctn

SEQ ID NO: 246 - RNA, 21 nt, synthetic construct
  source 1..21: mol_type = other RNA
cctcagatgctacccaatccn

SEQ ID NO: 247 - RNA, 21 nt, synthetic construct
  source 1..21: mol_type = other RNA
cctatgaatgcattcttattn

SEQ ID NO: 248 - RNA, 21 nt, synthetic construct
  source 1..21: mol_type = other RNA
cagctggttgggaaatgacan

SEQ ID NO: 249 - RNA, 21 nt, synthetic construct
  source 1..21: mol_type = other RNA
attcagctggttgggaaatgn

SEQ ID NO: 250 - RNA, 21 nt, synthetic construct
  source 1..21: mol_type = other RNA
cctaaagtcaagtccacgaan

SEQ ID NO: 251 - RNA, 21 nt, synthetic construct
  source 1..21: mol_type = other RNA
ttcgaggatatttggatgcan

SEQ ID NO: 252 - RNA, 21 nt, synthetic construct
  source 1..21: mol_type = other RNA
gaacctctaccttctctcgan

SEQ ID NO: 253 - RNA, 21 nt, synthetic construct
  source 1..21: mol_type = other RNA
gataatgtcttatgtaatgcn

SEQ ID NO: 254 - RNA, 21 nt, synthetic construct
  source 1..21: mol_type = other RNA
gttctggtgtctgactttcgn

SEQ ID NO: 255 - RNA, 21 nt, synthetic construct
  source 1..21: mol_type = other RNA
tctggtgtctgactttcggtn

SEQ ID NO: 256 - RNA, 21 nt, synthetic construct
  source 1..21: mol_type = other RNA
ccttctctcgagagcttttgn

SEQ ID NO: 257 - RNA, 21 nt, synthetic construct
  source 1..21: mol_type = other RNA
ggaggagtgagtgacaacgtn

SEQ ID NO: 258 - RNA, 21 nt, synthetic construct
  source 1..21: mol_type = other RNA
cttccatccatccttcaactn

SEQ ID NO: 259 - RNA, 21 nt, synthetic construct
  source 1..21: mol_type = other RNA
ccatccatccttcaacttaan

SEQ ID NO: 260 - RNA, 21 nt, synthetic construct
  source 1..21: mol_type = other RNA
tacagcactgagtgaagaaan

SEQ ID NO: 261 - RNA, 21 nt, synthetic construct
  source 1..21: mol_type = other RNA
ccatccttcaacttaagcaan

SEQ ID NO: 262 - RNA, 21 nt, synthetic construct
  source 1..21: mol_type = other RNA
ccattaggataatgtcttatn

SEQ ID NO: 263 - RNA, 21 nt, synthetic construct
  source 1..21: mol_type = other RNA
cattaggataatgtcttatgn

SEQ ID NO: 264 - RNA, 21 nt, synthetic construct
  source 1..21: mol_type = other RNA
cattaggataatgtcttatgn

SEQ ID NO: 265 - RNA, 21 nt, synthetic construct
  source 1..21: mol_type = other RNA
agaagggatggatcctgaggn

SEQ ID NO: 266 - RNA, 21 nt, synthetic construct
  source 1..21: mol_type = other RNA
agggatggatcctgaggtcgn

SEQ ID NO: 267 - RNA, 21 nt, synthetic construct
  source 1..21: mol_type = other RNA
tgacctcacaggtgttcactn

SEQ ID NO: 268 - RNA, 21 nt, synthetic construct
  source 1..21: mol_type = other RNA
atgcccgacgatgtcctgtgn

SEQ ID NO: 269 - RNA, 21 nt, synthetic construct
  source 1..21: mol_type = other RNA
caggtgttcactcgagtgctn

SEQ ID NO: 270 - RNA, 21 nt, synthetic construct
  source 1..21: mol_type = other RNA
ctgggcaaacatgagtctggn

SEQ ID NO: 271 - RNA, 21 nt, synthetic construct
  source 1..21: mol_type = other RNA
caaacatgagtctggattctn

SEQ ID NO: 272 - RNA, 21 nt, synthetic construct
  source 1..21: mol_type = other RNA
tcctctcagatcttgtgcggn

SEQ ID NO: 273 - RNA, 21 nt, synthetic construct
  source 1..21: mol_type = other RNA
cctctcagatcttgtgcggan

SEQ ID NO: 274 - RNA, 21 nt, synthetic construct
  source 1..21: mol_type = other RNA
ttaggataatgtcttatgtan

SEQ ID NO: 275 - RNA, 21 nt, synthetic construct
  source 1..21: mol_type = other RNA
acgtattttctttctgctttn

SEQ ID NO: 276 - RNA, 21 nt, synthetic construct
  source 1..21: mol_type = other RNA
acgtattttctttctgctttn

SEQ ID NO: 277 - RNA, 21 nt, synthetic construct
  source 1..21: mol_type = other RNA
ggacgtattttctttctgctn

SEQ ID NO: 278 - RNA, 21 nt, synthetic construct
  source 1..21: mol_type = other RNA
gatggagacaagcccttgatn

SEQ ID NO: 279 - RNA, 21 nt, synthetic construct
  source 1..21: mol_type = other RNA
gatggagacaagcccttgatn

SEQ ID NO: 280 - RNA, 21 nt, synthetic construct
  source 1..21: mol_type = other RNA
ttgatggagacaagcccttgn

SEQ ID NO: 281 - RNA, 21 nt, synthetic construct
  source 1..21: mol_type = other RNA
tgatggagacaagcccttttn

SEQ ID NO: 282 - RNA, 21 nt, synthetic construct
  source 1..21: mol_type = other RNA
tgatggagacaagcccttttn

SEQ ID NO: 283 - RNA, 21 nt, synthetic construct
  source 1..21: mol_type = other RNA
cttgatggagacaagcccttn

SEQ ID NO: 284 - RNA, 21 nt, synthetic construct
  source 1..21: mol_type = other RNA
ttctagggacaaactctattn

SEQ ID NO: 285 - RNA, 21 nt, synthetic construct
  source 1..21: mol_type = other RNA
ttctagggacaaactctattn

SEQ ID NO: 286 - RNA, 21 nt, synthetic construct
  source 1..21: mol_type = other RNA
ggttctagggacaaactctan

SEQ ID NO: 287 - RNA, 21 nt, synthetic construct
  source 1..21: mol_type = other RNA
acaggtgttcactcgagtgcn

SEQ ID NO: 288 - RNA, 21 nt, synthetic construct
  source 1..21: mol_type = other RNA
gacgatgtcctgtggttgcan

SEQ ID NO: 289 - RNA, 21 nt, synthetic construct
  source 1..21: mol_type = other RNA
acctcacaggtgttcactcgn

SEQ ID NO: 290 - RNA, 21 nt, synthetic construct
  source 1..21: mol_type = other RNA
acttaagcaagttcctccgan

SEQ ID NO: 291 - RNA, 21 nt, synthetic construct
  source 1..21: mol_type = other RNA
atcaccaagctcagtctacgn

SEQ ID NO: 292 - RNA, 21 nt, synthetic construct
  source 1..21: mol_type = other RNA
ggattcttccccggagtcggn

SEQ ID NO: 293 - RNA, 21 nt, synthetic construct
  source 1..21: mol_type = other RNA
gtaccctgcctgtggaatctn

SEQ ID NO: 294 - RNA, 21 nt, synthetic construct
  source 1..21: mol_type = other RNA
gataatgtcttatgtaatgcn

SEQ ID NO: 295 - RNA, 21 nt, synthetic construct
  source 1..21: mol_type = other RNA
gataatgtcttatgtaatgcn

SEQ ID NO: 296 - RNA, 21 nt, synthetic construct
  source 1..21: mol_type = other RNA
gataatgtcttatgtaatgcn

SEQ ID NO: 297 - RNA, 21 nt, synthetic construct
  source 1..21: mol_type = other RNA
caacgtacccttcattgatgn

SEQ ID NO: 298 - RNA, 21 nt, synthetic construct
  source 1..21: mol_type = other RNA
gataatgtcttatgtaatgcn

SEQ ID NO: 299 - RNA, 21 nt, synthetic construct
  source 1..21: mol_type = other RNA
acatggcttccagatatgccn

SEQ ID NO: 300 - RNA, 21 nt, synthetic construct
  source 1..21: mol_type = other RNA
caacgtacccttcattgatgn

SEQ ID NO: 301 - RNA, 21 nt, synthetic construct
  source 1..21: mol_type = other RNA
caacgtacccttcattgatgn

SEQ ID NO: 302 - RNA, 21 nt, synthetic construct
  source 1..21: mol_type = other RNA
caacgtacccttcattgatgn

SEQ ID NO: 303 - RNA, 21 nt, synthetic construct
  source 1..21: mol_type = other RNA
caacgtacccttcattgattn

SEQ ID NO: 304 - RNA, 21 nt, synthetic construct
  source 1..21: mol_type = other RNA
caacgtacccttcattgattn

SEQ ID NO: 305 - RNA, 21 nt, synthetic construct
  source 1..21: mol_type = other RNA
caacgtacccttcattgatgn

SEQ ID NO: 306 - RNA, 21 nt, synthetic construct
  source 1..21: mol_type = other RNA
caacgtacccttcattgatgn

SEQ ID NO: 307 - RNA, 21 nt, synthetic construct
  source 1..21: mol_type = other RNA
caacgtacccttcattgatgn

SEQ ID NO: 308 - RNA, 21 nt, synthetic construct
  source 1..21: mol_type = other RNA
caacgtacccttcattgatgn

SEQ ID NO: 309 - RNA, 21 nt, synthetic construct
  source 1..21: mol_type = other RNA
acgtacccttcattgatgttn

SEQ ID NO: 310 - RNA, 21 nt, synthetic construct
  source 1..21: mol_type = other RNA
acgtacccttcattgatgttn

SEQ ID NO: 311 - RNA, 21 nt, synthetic construct
  source 1..21: mol_type = other RNA
caacgtacccttcattgatgn

SEQ ID NO: 312 - RNA, 21 nt, synthetic construct
  source 1..21: mol_type = other RNA
acatggcttccagatatgccn

SEQ ID NO: 313-564 - skipped (252 entries)

SEQ ID NO: 565 - RNA, 23 nt, synthetic construct
  source 1..23: mol_type = other RNA
taaggaaggagggataaggccac

SEQ ID NO: 566 - RNA, 23 nt, synthetic construct
  source 1..23: mol_type = other RNA
acttgactttagggcagatgttt

SEQ ID NO: 567 - RNA, 23 nt, synthetic construct
  source 1..23: mol_type = other RNA
tagaggttccctgtgcagaggtt

SEQ ID NO: 568 - RNA, 23 nt, synthetic construct
  source 1..23: mol_type = other RNA
acgcagcccgcgaaggacaagtt

SEQ ID NO: 569 - RNA, 23 nt, synthetic construct
  source 1..23: mol_type = other RNA
aacgcaggtggtctagcagcttt

SEQ ID NO: 570 - RNA, 23 nt, synthetic construct
  source 1..23: mol_type = other RNA
atccaaatatcctcgaaggcatt

SEQ ID NO: 571 - RNA, 23 nt, synthetic construct
  source 1..23: mol_type = other RNA
atccaaatatcctcgaaggcatt

SEQ ID NO: 572 - RNA, 23 nt, synthetic construct
  source 1..23: mol_type = other RNA
attgactttagggcagatgtctt

SEQ ID NO: 573 - RNA, 23 nt, synthetic construct
  source 1..23: mol_type = other RNA
ttgactttagggcagatgtcgtt

SEQ ID NO: 574 - RNA, 23 nt, synthetic construct
  source 1..23: mol_type = other RNA
atcctcgaaggcatatctctctt

SEQ ID NO: 575 - RNA, 23 nt, synthetic construct
  source 1..23: mol_type = other RNA
aatgggtagcaagttgcaaattt

SEQ ID NO: 576 - RNA, 23 nt, synthetic construct
  source 1..23: mol_type = other RNA
agccgaacaacatgcgcgcgttt

SEQ ID NO: 577 - RNA, 23 nt, synthetic construct
  source 1..23: mol_type = other RNA
actaatgggtagcaagttgcatt

SEQ ID NO: 578 - RNA, 23 nt, synthetic construct
  source 1..23: mol_type = other RNA
aaaatatcctcgaaggcatattt

SEQ ID NO: 579 - RNA, 23 nt, synthetic construct
  source 1..23: mol_type = other RNA
acgaaggacaagctccagccgtt

SEQ ID NO: 580 - RNA, 23 nt, synthetic construct
  source 1..23: mol_type = other RNA
atatcctcgaaggcatatctctt

SEQ ID NO: 581 - RNA, 23 nt, synthetic construct
  source 1..23: mol_type = other RNA
aactttagggcagatgtcgtatt

SEQ ID NO: 582 - RNA, 23 nt, synthetic construct
  source 1..23: mol_type = other RNA
atgtatccacctttgtctttctt

SEQ ID NO: 583 - RNA, 23 nt, synthetic construct
  source 1..23: mol_type = other RNA
actcgaaggcatatctctccctt

SEQ ID NO: 584 - RNA, 23 nt, synthetic construct
  source 1..23: mol_type = other RNA
atcgaaggcatatctctcccatt

SEQ ID NO: 585 - RNA, 23 nt, synthetic construct
  source 1..23: mol_type = other RNA
ataatgggtagcaagttgcaatt

SEQ ID NO: 586 - RNA, 23 nt, synthetic construct
  source 1..23: mol_type = other RNA
tcgaaggcatatctctcccagtt

SEQ ID NO: 587 - RNA, 23 nt, synthetic construct
  source 1..23: mol_type = other RNA
agtagcaagttgcaaatcttgtt

SEQ ID NO: 588 - RNA, 23 nt, synthetic construct
  source 1..23: mol_type = other RNA
aaaatcttgctcatgtatccatt

SEQ ID NO: 589 - RNA, 23 nt, synthetic construct
  source 1..23: mol_type = other RNA
tcccagcaccttgagatccggtt

SEQ ID NO: 590 - RNA, 23 nt, synthetic construct
  source 1..23: mol_type = other RNA
agagaggacgccgacgcagtgtt

SEQ ID NO: 591 - RNA, 23 nt, synthetic construct
  source 1..23: mol_type = other RNA
ttatcctaatgggtagcaagttt

SEQ ID NO: 592 - RNA, 23 nt, synthetic construct
  source 1..23: mol_type = other RNA
tatcctaatgggtagcaagtttt

SEQ ID NO: 593 - RNA, 23 nt, synthetic construct
  source 1..23: mol_type = other RNA
agcagatgtcgtactccccattt

SEQ ID NO: 594 - RNA, 23 nt, synthetic construct
  source 1..23: mol_type = other RNA
acatcaatgaagggtacgttgtt

SEQ ID NO: 595 - RNA, 22 nt, synthetic construct
  source 1..22: mol_type = other RNA
acatcaatgaagggtacgttgt

SEQ ID NO: 596 - RNA, 23 nt, synthetic construct
  source 1..23: mol_type = other RNA
aatcaatgaagggtacgttgttt

SEQ ID NO: 597 - RNA, 23 nt, synthetic construct
  source 1..23: mol_type = other RNA
tcgcacgcctctgaaggaaggtt

SEQ ID NO: 598 - RNA, 23 nt, synthetic construct
  source 1..23: mol_type = other RNA
atcaatgaagggtacgttgtctt

SEQ ID NO: 599 - RNA, 23 nt, synthetic construct
  source 1..23: mol_type = other RNA
agggataaggccactgtagaatt

SEQ ID NO: 600 - RNA, 23 nt, synthetic construct
  source 1..23: mol_type = other RNA
atccacgacttcgtctttggatt

SEQ ID NO: 601 - RNA, 23 nt, synthetic construct
  source 1..23: mol_type = other RNA
aacaagatctgagaggacctgtt

SEQ ID NO: 602 - RNA, 23 nt, synthetic construct
  source 1..23: mol_type = other RNA
aacaagatctgagaggacctgtt

SEQ ID NO: 603 - RNA, 23 nt, synthetic construct
  source 1..23: mol_type = other RNA
acaagatctgagaggacctgctt

SEQ ID NO: 604 - RNA, 23 nt, synthetic construct
  source 1..23: mol_type = other RNA
agtgaaaaactgggaaaggtgtt

SEQ ID NO: 605 - RNA, 23 nt, synthetic construct
  source 1..23: mol_type = other RNA
atgaaaaactgggaaaggtggtt

SEQ ID NO: 606 - RNA, 23 nt, synthetic construct
  source 1..23: mol_type = other RNA
aatgaagggtacgttgtcacttt

SEQ ID NO: 607 - RNA, 23 nt, synthetic construct
  source 1..23: mol_type = other RNA
aaagggtacgttgtcactcactt

SEQ ID NO: 608 - RNA, 23 nt, synthetic construct
  source 1..23: mol_type = other RNA
aaagggtacgttgtcactcactt

SEQ ID NO: 609 - RNA, 23 nt, synthetic construct
  source 1..23: mol_type = other RNA
aacgacttcgtctttggaccgtt

SEQ ID NO: 610 - RNA, 23 nt, synthetic construct
  source 1..23: mol_type = other RNA
aagtcagacaccagaacgttttt

SEQ ID NO: 611 - RNA, 23 nt, synthetic construct
  source 1..23: mol_type = other RNA
agccatgtcaccagtctctggtt

SEQ ID NO: 612 - RNA, 23 nt, synthetic construct
  source 1..23: mol_type = other RNA
atccacatatcgcacgcctcttt

SEQ ID NO: 613 - RNA, 23 nt, synthetic construct
  source 1..23: mol_type = other RNA
agacaccagaacgttttcccctt

SEQ ID NO: 614 - RNA, 23 nt, synthetic construct
  source 1..23: mol_type = other RNA
aacaccagaacgttttccccatt

SEQ ID NO: 615 - RNA, 22 nt, synthetic construct
  source 1..22: mol_type = other RNA
aacaccagaacgttttccccat

SEQ ID NO: 616 - RNA, 23 nt, synthetic construct
  source 1..23: mol_type = other RNA
aacatcgtcgggcatatctggtt

SEQ ID NO: 617 - RNA, 23 nt, synthetic construct
  source 1..23: mol_type = other RNA
aacaatcgcaatggcagattctt

SEQ ID NO: 618 - RNA, 23 nt, synthetic construct
  source 1..23: mol_type = other RNA
aattatcctaatgggtagcaatt

SEQ ID NO: 619 - RNA, 23 nt, synthetic construct
  source 1..23: mol_type = other RNA
tagttaggtgaaaaaggtgtttt

SEQ ID NO: 620 - RNA, 23 nt, synthetic construct
  source 1..23: mol_type = other RNA
ataaaaccaactcagctcagatt

SEQ ID NO: 621 - RNA, 23 nt, synthetic construct
  source 1..23: mol_type = other RNA
ttcataaaaccaactcagctctt

SEQ ID NO: 622 - RNA, 23 nt, synthetic construct
  source 1..23: mol_type = other RNA
tttcataaaaccaactcagcttt

SEQ ID NO: 623 - RNA, 23 nt, synthetic construct
  source 1..23: mol_type = other RNA
actagcttttcataaaaccaatt

SEQ ID NO: 624 - RNA, 23 nt, synthetic construct
  source 1..23: mol_type = other RNA
aagtcagtaagggaccctctgtt

SEQ ID NO: 625 - RNA, 23 nt, synthetic construct
  source 1..23: mol_type = other RNA
ttagttaggtgaaaaaggtgttt

SEQ ID NO: 626 - RNA, 23 nt, synthetic construct
  source 1..23: mol_type = other RNA
tttagttaggtgaaaaaggtgtt

SEQ ID NO: 627 - RNA, 23 nt, synthetic construct
  source 1..23: mol_type = other RNA
ttttagttaggtgaaaaaggttt

SEQ ID NO: 628 - RNA, 23 nt, synthetic construct
  source 1..23: mol_type = other RNA
attttagttaggtgaaaaaggtt

SEQ ID NO: 629 - RNA, 23 nt, synthetic construct
  source 1..23: mol_type = other RNA
tattttagttaggtgaaaaagtt

SEQ ID NO: 630 - RNA, 23 nt, synthetic construct
  source 1..23: mol_type = other RNA
attattttagttaggtgaaaatt

SEQ ID NO: 631 - RNA, 21 nt, synthetic construct
  source 1..21: mol_type = other RNA
attgactttagggcagatgtc

SEQ ID NO: 632 - RNA, 21 nt, synthetic construct
  source 1..21: mol_type = other RNA
aacaatcgcaatggcagattc

SEQ ID NO: 633 - RNA, 21 nt, synthetic construct
  source 1..21: mol_type = other RNA
aacaatcgcaatggcagattc

SEQ ID NO: 634 - RNA, 21 nt, synthetic construct
  source 1..21: mol_type = other RNA
acatcaatgaagggtacgttg

SEQ ID NO: 635 - RNA, 21 nt, synthetic construct
  source 1..21: mol_type = other RNA
acatcaatgaagggtacgttg

SEQ ID NO: 636 - RNA, 21 nt, synthetic construct
  source 1..21: mol_type = other RNA
atcaatgaagggtacgttgtc

SEQ ID NO: 637 - RNA, 21 nt, synthetic construct
  source 1..21: mol_type = other RNA
acgaaggacaagctccagccg

SEQ ID NO: 638 - RNA, 21 nt, synthetic construct
  source 1..21: mol_type = other RNA
attgactttagggcagatgtt

SEQ ID NO: 639 - RNA, 21 nt, synthetic construct
  source 1..21: mol_type = other RNA
aacaatcgcaatggcagactt

SEQ ID NO: 640 - RNA, 21 nt, synthetic construct
  source 1..21: mol_type = other RNA
acatcaatgaagggtacgctt

SEQ ID NO: 641 - RNA, 21 nt, synthetic construct
  source 1..21: mol_type = other RNA
atcaatgaagggtacgttgtt

SEQ ID NO: 642 - RNA, 21 nt, synthetic construct
  source 1..21: mol_type = other RNA
acgaaggacaagctccagctt

SEQ ID NO: 643 - RNA, 23 nt, synthetic construct
  source 1..23: mol_type = other RNA
attgactttagggcagatgtctt

SEQ ID NO: 644 - RNA, 23 nt, synthetic construct
  source 1..23: mol_type = other RNA
aacaatcgcaatggcagattctt

SEQ ID NO: 645 - RNA, 23 nt, synthetic construct
  source 1..23: mol_type = other RNA
acatcaatgaagggtacgttgtt

SEQ ID NO: 646 - RNA, 23 nt, synthetic construct
  source 1..23: mol_type = other RNA
atcaatgaagggtacgttgtctt

SEQ ID NO: 647 - RNA, 23 nt, synthetic construct
  source 1..23: mol_type = other RNA
acgaaggacaagctccagccgtt

SEQ ID NO: 648 - RNA, 23 nt, synthetic construct
  source 1..23: mol_type = other RNA
attgactttagggcagatgtctt

SEQ ID NO: 649 - RNA, 23 nt, synthetic construct
  source 1..23: mol_type = other RNA
aacaatcgcaatggcagattctt

SEQ ID NO: 650 - RNA, 23 nt, synthetic construct
  source 1..23: mol_type = other RNA
atcaatgaagggtacgttgtctt

SEQ ID NO: 651 - RNA, 23 nt, synthetic construct
  source 1..23: mol_type = other RNA
acgaaggacaagctccagccgtt

SEQ ID NO: 652 - RNA, 21 nt, synthetic construct
  source 1..21: mol_type = other RNA
attgactttagggcagatgtt

SEQ ID NO: 653 - RNA, 21 nt, synthetic construct
  source 1..21: mol_type = other RNA
aacaatcgcaatggcagactt

SEQ ID NO: 654 - RNA, 21 nt, synthetic construct
  source 1..21: mol_type = other RNA
acatcaatgaagggtacgctt

SEQ ID NO: 655 - RNA, 21 nt, synthetic construct
  source 1..21: mol_type = other RNA
atcaatgaagggtacgttgtt

SEQ ID NO: 656 - RNA, 20 nt, synthetic construct
  source 1..20: mol_type = other RNA
atcaatgaagggtacgttgt

SEQ ID NO: 657 - RNA, 21 nt, synthetic construct
  source 1..21: mol_type = other RNA
acgaaggacaagctccagctt

SEQ ID NO: 658 - RNA, 21 nt, synthetic construct
  source 1..21: mol_type = other RNA
attgactttagggcagatgtc

SEQ ID NO: 659 - RNA, 21 nt, synthetic construct
  source 1..21: mol_type = other RNA
attgactttagggcagatgtc

SEQ ID NO: 660 - RNA, 21 nt, synthetic construct
  source 1..21: mol_type = other RNA
aacaatcgcaatggcagattc

SEQ ID NO: 661 - RNA, 21 nt, synthetic construct
  source 1..21: mol_type = other RNA
acatcaatgaagggtacgttg

SEQ ID NO: 662 - RNA, 21 nt, synthetic construct
  source 1..21: mol_type = other RNA
atcaatgaagggtacgttgtc

SEQ ID NO: 663 - RNA, 20 nt, synthetic construct
  source 1..20: mol_type = other RNA
acgaaggacaagctccagcc

SEQ ID NO: 664 - RNA, 21 nt, synthetic construct
  source 1..21: mol_type = other RNA
atcaatgaagggtacgttgtt

SEQ ID NO: 665 - RNA, 20 nt, synthetic construct
  source 1..20: mol_type = other RNA
atcaatgaagggtacgttgt

SEQ ID NO: 666 - RNA, 23 nt, synthetic construct
  source 1..23: mol_type = other RNA
aagcagacacatcagcactcgtt

SEQ ID NO: 667 - RNA, 23 nt, synthetic construct
  source 1..23: mol_type = other RNA
atccacctttgtctttcattttt

SEQ ID NO: 668 - RNA, 23 nt, synthetic construct
  source 1..23: mol_type = other RNA
tccacctttgtctttcatttctt

SEQ ID NO: 669 - RNA, 23 nt, synthetic construct
  source 1..23: mol_type = other RNA
tccacatgaagaaagttcgtgtt

SEQ ID NO: 670 - RNA, 23 nt, synthetic construct
  source 1..23: mol_type = other RNA
aggtactttattgcccaagaatt

SEQ ID NO: 671 - RNA, 22 nt, synthetic construct
  source 1..22: mol_type = other RNA
aggtactttattgcccaagaat

SEQ ID NO: 672 - RNA, 22 nt, synthetic construct
  source 1..22: mol_type = other RNA
aggtactttattgcccaagaat

SEQ ID NO: 673 - RNA, 23 nt, synthetic construct
  source 1..23: mol_type = other RNA
agagagaaggtagaggttccctt

SEQ ID NO: 674 - RNA, 23 nt, synthetic construct
  source 1..23: mol_type = other RNA
agggtacgttgtcactcactctt

SEQ ID NO: 675 - RNA, 23 nt, synthetic construct
  source 1..23: mol_type = other RNA
agaaagtcagacaccagaacgtt

SEQ ID NO: 676 - RNA, 23 nt, synthetic construct
  source 1..23: mol_type = other RNA
aggtacgttgtcactcactcctt

SEQ ID NO: 677 - RNA, 23 nt, synthetic construct
  source 1..23: mol_type = other RNA
acaggtactttattgcccaagtt

SEQ ID NO: 678 - RNA, 23 nt, synthetic construct
  source 1..23: mol_type = other RNA
tgccataagggttttgatatatt

SEQ ID NO: 679 - RNA, 23 nt, synthetic construct
  source 1..23: mol_type = other RNA
tgattcacataatacaaaatttt

SEQ ID NO: 680 - RNA, 23 nt, synthetic construct
  source 1..23: mol_type = other RNA
aacataatacaaaattcaacatt

SEQ ID NO: 681 - RNA, 23 nt, synthetic construct
  source 1..23: mol_type = other RNA
agttattttctcatgctgaaatt

SEQ ID NO: 682 - RNA, 23 nt, synthetic construct
  source 1..23: mol_type = other RNA
agtttcctttaaagggtctgttt

SEQ ID NO: 683 - RNA, 23 nt, synthetic construct
  source 1..23: mol_type = other RNA
tcctggtgtcatttcccaacctt

SEQ ID NO: 684 - RNA, 23 nt, synthetic construct
  source 1..23: mol_type = other RNA
atggtgtcatttcccaaccagtt

SEQ ID NO: 685 - RNA, 23 nt, synthetic construct
  source 1..23: mol_type = other RNA
atgttggaccaggcatggtagtt

SEQ ID NO: 686 - RNA, 23 nt, synthetic construct
  source 1..23: mol_type = other RNA
tccagaggtggttcaggaagatt

SEQ ID NO: 687 - RNA, 23 nt, synthetic construct
  source 1..23: mol_type = other RNA
tagaaacttgggcaacacatatt

SEQ ID NO: 688 - RNA, 23 nt, synthetic construct
  source 1..23: mol_type = other RNA
atttaaagggtctgtcttctctt

SEQ ID NO: 689 - RNA, 23 nt, synthetic construct
  source 1..23: mol_type = other RNA
aatagaaacttgggcaacacatt

SEQ ID NO: 690 - RNA, 23 nt, synthetic construct
  source 1..23: mol_type = other RNA
atactgattattcctgagagttt

SEQ ID NO: 691 - RNA, 23 nt, synthetic construct
  source 1..23: mol_type = other RNA
agaatgcattcataggccaattt

SEQ ID NO: 692 - RNA, 23 nt, synthetic construct
  source 1..23: mol_type = other RNA
ttttttcctgataacaatcactt

SEQ ID NO: 693 - RNA, 23 nt, synthetic construct
  source 1..23: mol_type = other RNA
attacacttcctgatttcctttt

SEQ ID NO: 694 - RNA, 23 nt, synthetic construct
  source 1..23: mol_type = other RNA
aagaggccttgggaactcacttt

SEQ ID NO: 695 - RNA, 23 nt, synthetic construct
  source 1..23: mol_type = other RNA
atagagtttgtccctagaacctt

SEQ ID NO: 696 - RNA, 22 nt, synthetic construct
  source 1..22: mol_type = other RNA
atagagtttgtccctagaacct

SEQ ID NO: 697 - RNA, 23 nt, synthetic construct
  source 1..23: mol_type = other RNA
aaacttgggaaaagaaacttgtt

SEQ ID NO: 698 - RNA, 23 nt, synthetic construct
  source 1..23: mol_type = other RNA
tgtccctagaacccgtttccttt

SEQ ID NO: 699 - RNA, 23 nt, synthetic construct
  source 1..23: mol_type = other RNA
aaatgaagaatgttggaccagtt

SEQ ID NO: 700 - RNA, 23 nt, synthetic construct
  source 1..23: mol_type = other RNA
agaatgagaagatgcaaggagtt

SEQ ID NO: 701 - RNA, 23 nt, synthetic construct
  source 1..23: mol_type = other RNA
agtctgaccattaatagggcctt

SEQ ID NO: 702 - RNA, 23 nt, synthetic construct
  source 1..23: mol_type = other RNA
atttagcacctctgaaagaattt

SEQ ID NO: 703 - RNA, 21 nt, synthetic construct
  source 1..21: mol_type = other RNA
aagcagacacatcagcacttt

SEQ ID NO: 704 - RNA, 21 nt, synthetic construct
  source 1..21: mol_type = other RNA
tccacctttgtctttcatttt

SEQ ID NO: 705 - RNA, 21 nt, synthetic construct
  source 1..21: mol_type = other RNA
aggtactttattgcccaagtt

SEQ ID NO: 706 - RNA, 21 nt, synthetic construct
  source 1..21: mol_type = other RNA
aggtacgttgtcactcacttt

SEQ ID NO: 707 - RNA, 21 nt, synthetic construct
  source 1..21: mol_type = other RNA
aagcagacacatcagcacttt

SEQ ID NO: 708 - RNA, 21 nt, synthetic construct
  source 1..21: mol_type = other RNA
tccacctttgtctttcatttt

SEQ ID NO: 709 - RNA, 21 nt, synthetic construct
  source 1..21: mol_type = other RNA
aggtactttattgcccaagtt

SEQ ID NO: 710 - RNA, 21 nt, synthetic construct
  source 1..21: mol_type = other RNA
aggtacgttgtcactcacttt

SEQ ID NO: 711 - RNA, 23 nt, synthetic construct
  source 1..23: mol_type = other RNA
aagcagacacatcagcactcgtt

SEQ ID NO: 712 - RNA, 23 nt, synthetic construct
  source 1..23: mol_type = other RNA
tccacctttgtctttcatttctt

SEQ ID NO: 713 - RNA, 23 nt, synthetic construct
  source 1..23: mol_type = other RNA
aggtactttattgcccaagaatt

SEQ ID NO: 714 - RNA, 23 nt, synthetic construct
  source 1..23: mol_type = other RNA
aggtacgttgtcactcactcctt

SEQ ID NO: 715 - RNA, 23 nt, synthetic construct
  source 1..23: mol_type = other RNA
aagcagacacatcagcactcgtt

SEQ ID NO: 716 - RNA, 23 nt, synthetic construct
  source 1..23: mol_type = other RNA
tccacctttgtctttcatttctt

SEQ ID NO: 717 - RNA, 23 nt, synthetic construct
  source 1..23: mol_type = other RNA
aggtactttattgcccaagaatt

SEQ ID NO: 718 - RNA, 23 nt, synthetic construct
  source 1..23: mol_type = other RNA
aggtacgttgtcactcactcctt

SEQ ID NO: 719 - RNA, 21 nt, synthetic construct
  source 1..21: mol_type = other RNA
aagcagacacatcagcacttt

SEQ ID NO: 720 - RNA, 21 nt, synthetic construct
  source 1..21: mol_type = other RNA
tccacctttgtctttcatttt

SEQ ID NO: 721 - RNA, 21 nt, synthetic construct
  source 1..21: mol_type = other RNA
aggtactttattgcccaagtt

SEQ ID NO: 722 - RNA, 21 nt, synthetic construct
  source 1..21: mol_type = other RNA
aggtacgttgtcactcacttt

SEQ ID NO: 723 - RNA, 21 nt, synthetic construct
  source 1..21: mol_type = other RNA
aagcagacacatcagcacttt

SEQ ID NO: 724 - RNA, 21 nt, synthetic construct
  source 1..21: mol_type = other RNA
tccacctttgtctttcatttt

SEQ ID NO: 725 - RNA, 21 nt, synthetic construct
  source 1..21: mol_type = other RNA
aggtactttattgcccaagtt

SEQ ID NO: 726 - RNA, 21 nt, synthetic construct
  source 1..21: mol_type = other RNA
aggtacgttgtcactcacttt

SEQ ID NO: 727 - RNA, 23 nt, synthetic construct
  source 1..23: mol_type = other RNA
aaattacaaataacagtctgctt

SEQ ID NO: 728 - RNA, 23 nt, synthetic construct
  source 1..23: mol_type = other RNA
tcacataatacaaaattcaactt

SEQ ID NO: 729 - RNA, 23 nt, synthetic construct
  source 1..23: mol_type = other RNA
agttcaccatagaaacttgggtt

SEQ ID NO: 730 - RNA, 23 nt, synthetic construct
  source 1..23: mol_type = other RNA
aaaaaggtgttctaaaattaatt

SEQ ID NO: 731 - RNA, 23 nt, synthetic construct
  source 1..23: mol_type = other RNA
tttcctttaaagggtctgtcttt

SEQ ID NO: 732 - RNA, 23 nt, synthetic construct
  source 1..23: mol_type = other RNA
ttcctttaaagggtctgtctttt

SEQ ID NO: 733 - RNA, 23 nt, synthetic construct
  source 1..23: mol_type = other RNA
tttaaagggtctgtcttctcatt

SEQ ID NO: 734 - RNA, 23 nt, synthetic construct
  source 1..23: mol_type = other RNA
aattatcacacctggggaaaatt

SEQ ID NO: 735 - RNA, 23 nt, synthetic construct
  source 1..23: mol_type = other RNA
aagcagaaagaaaatacgtcctt

SEQ ID NO: 736 - RNA, 22 nt, synthetic construct
  source 1..22: mol_type = other RNA
aagcagaaagaaaatacgtcct

SEQ ID NO: 737 - RNA, 23 nt, synthetic construct
  source 1..23: mol_type = other RNA
atcaagatgtaagaaggcaggtt

SEQ ID NO: 738 - RNA, 23 nt, synthetic construct
  source 1..23: mol_type = other RNA
agcctaagcaaagggtgcctttt

SEQ ID NO: 739 - RNA, 23 nt, synthetic construct
  source 1..23: mol_type = other RNA
aagtagcctcttttctcaaagtt

SEQ ID NO: 740 - RNA, 23 nt, synthetic construct
  source 1..23: mol_type = other RNA
tcaagggcttgtctccatcaatt

SEQ ID NO: 741 - RNA, 22 nt, synthetic construct
  source 1..22: mol_type = other RNA
tcaagggcttgtctccatcaat

SEQ ID NO: 742 - RNA, 23 nt, synthetic construct
  source 1..23: mol_type = other RNA
aaagggcttgtctccatcaagtt

SEQ ID NO: 743 - RNA, 22 nt, synthetic construct
  source 1..22: mol_type = other RNA
aaagggcttgtctccatcaagt

SEQ ID NO: 744 - RNA, 23 nt, synthetic construct
  source 1..23: mol_type = other RNA
atgggaaacttgggaaaagaatt

SEQ ID NO: 745 - RNA, 23 nt, synthetic construct
  source 1..23: mol_type = other RNA
tgaacagaggccttgggaacttt

SEQ ID NO: 746 - RNA, 23 nt, synthetic construct
  source 1..23: mol_type = other RNA
ttacacttcctgatttccttatt

SEQ ID NO: 747 - RNA, 23 nt, synthetic construct
  source 1..23: mol_type = other RNA
aagaggttggggtgatcagagtt

SEQ ID NO: 748 - RNA, 23 nt, synthetic construct
  source 1..23: mol_type = other RNA
agcaaagggtgccttctggagtt

SEQ ID NO: 749 - RNA, 23 nt, synthetic construct
  source 1..23: mol_type = other RNA
aaggctcatactctgcactaatt

SEQ ID NO: 750 - RNA, 23 nt, synthetic construct
  source 1..23: mol_type = other RNA
aggattgggtagcatctgaggtt

SEQ ID NO: 751 - RNA, 23 nt, synthetic construct
  source 1..23: mol_type = other RNA
aaataagaatgcattcataggtt

SEQ ID NO: 752 - RNA, 23 nt, synthetic construct
  source 1..23: mol_type = other RNA
atgtcatttcccaaccagctgtt

SEQ ID NO: 753 - RNA, 23 nt, synthetic construct
  source 1..23: mol_type = other RNA
tcatttcccaaccagctgaattt

SEQ ID NO: 754 - RNA, 23 nt, synthetic construct
  source 1..23: mol_type = other RNA
attcgtggacttgactttaggtt

SEQ ID NO: 755 - RNA, 23 nt, synthetic construct
  source 1..23: mol_type = other RNA
atgcatccaaatatcctcgaatt

SEQ ID NO: 756 - RNA, 23 nt, synthetic construct
  source 1..23: mol_type = other RNA
atcgagagaaggtagaggttctt

SEQ ID NO: 757 - RNA, 23 nt, synthetic construct
  source 1..23: mol_type = other RNA
agcattacataagacattatctt

SEQ ID NO: 758 - RNA, 23 nt, synthetic construct
  source 1..23: mol_type = other RNA
acgaaagtcagacaccagaactt

SEQ ID NO: 759 - RNA, 23 nt, synthetic construct
  source 1..23: mol_type = other RNA
aaccgaaagtcagacaccagatt

SEQ ID NO: 760 - RNA, 23 nt, synthetic construct
  source 1..23: mol_type = other RNA
acaaaagctctcgagagaaggtt

SEQ ID NO: 761 - RNA, 23 nt, synthetic construct
  source 1..23: mol_type = other RNA
tacgttgtcactcactcctcctt

SEQ ID NO: 762 - RNA, 23 nt, synthetic construct
  source 1..23: mol_type = other RNA
aagttgaaggatggatggaagtt

SEQ ID NO: 763 - RNA, 23 nt, synthetic construct
  source 1..23: mol_type = other RNA
attaagttgaaggatggatggtt

SEQ ID NO: 764 - RNA, 23 nt, synthetic construct
  source 1..23: mol_type = other RNA
atttcttcactcagtgctgtatt

SEQ ID NO: 765 - RNA, 23 nt, synthetic construct
  source 1..23: mol_type = other RNA
attgcttaagttgaaggatggtt

SEQ ID NO: 766 - RNA, 23 nt, synthetic construct
  source 1..23: mol_type = other RNA
aataagacattatcctaatggtt

SEQ ID NO: 767 - RNA, 23 nt, synthetic construct
  source 1..23: mol_type = other RNA
acataagacattatcctaatgtt

SEQ ID NO: 768 - RNA, 22 nt, synthetic construct
  source 1..22: mol_type = other RNA
acataagacattatcctaatgt

SEQ ID NO: 769 - RNA, 23 nt, synthetic construct
  source 1..23: mol_type = other RNA
acctcaggatccatcccttcttt

SEQ ID NO: 770 - RNA, 23 nt, synthetic construct
  source 1..23: mol_type = other RNA
acgacctcaggatccatcccttt

SEQ ID NO: 771 - RNA, 23 nt, synthetic construct
  source 1..23: mol_type = other RNA
aagtgaacacctgtgaggtcatt

SEQ ID NO: 772 - RNA, 23 nt, synthetic construct
  source 1..23: mol_type = other RNA
acacaggacatcgtcgggcattt

SEQ ID NO: 773 - RNA, 23 nt, synthetic construct
  source 1..23: mol_type = other RNA
aagcactcgagtgaacacctgtt

SEQ ID NO: 774 - RNA, 23 nt, synthetic construct
  source 1..23: mol_type = other RNA
tccagactcatgtttgcccagtt

SEQ ID NO: 775 - RNA, 23 nt, synthetic construct
  source 1..23: mol_type = other RNA
aagaatccagactcatgtttgtt

SEQ ID NO: 776 - RNA, 23 nt, synthetic construct
  source 1..23: mol_type = other RNA
tccgcacaagatctgagaggatt

SEQ ID NO: 777 - RNA, 23 nt, synthetic construct
  source 1..23: mol_type = other RNA
ttccgcacaagatctgagaggtt

SEQ ID NO: 778 - RNA, 23 nt, synthetic construct
  source 1..23: mol_type = other RNA
ttacataagacattatcctaatt

SEQ ID NO: 779 - RNA, 20 nt, synthetic construct
  source 1..20: mol_type = other RNA
aagcagaaagaaaatacgtt

SEQ ID NO: 780 - RNA, 20 nt, synthetic construct
  source 1..20: mol_type = other RNA
aagcagaaagaaaatacgtt

SEQ ID NO: 781 - RNA, 22 nt, synthetic construct
  source 1..22: mol_type = other RNA
aagcagaaagaaaatacgtcct

SEQ ID NO: 782 - RNA, 20 nt, synthetic construct
  source 1..20: mol_type = other RNA
tcaagggcttgtctccatct

SEQ ID NO: 783 - RNA, 20 nt, synthetic construct
  source 1..20: mol_type = other RNA
tcaagggcttgtctccatct

SEQ ID NO: 784 - RNA, 22 nt, synthetic construct
  source 1..22: mol_type = other RNA
tcaagggcttgtctccatcaat

SEQ ID NO: 785 - RNA, 20 nt, synthetic construct
  source 1..20: mol_type = other RNA
aaagggcttgtctccatcat

SEQ ID NO: 786 - RNA, 20 nt, synthetic construct
  source 1..20: mol_type = other RNA
aaagggcttgtctccatcat

SEQ ID NO: 787 - RNA, 22 nt, synthetic construct
  source 1..22: mol_type = other RNA
aaagggcttgtctccatcaagt

SEQ ID NO: 788 - RNA, 20 nt, synthetic construct
  source 1..20: mol_type = other RNA
atagagtttgtccctagaat

SEQ ID NO: 789 - RNA, 20 nt, synthetic construct
  source 1..20: mol_type = other RNA
atagagtttgtccctagaat

SEQ ID NO: 790 - RNA, 22 nt, synthetic construct
  source 1..22: mol_type = other RNA
atagagtttgtccctagaacct

SEQ ID NO: 791 - RNA, 22 nt, synthetic construct
  source 1..22: mol_type = other RNA
agcactcgagtgaacacctgtt

SEQ ID NO: 792 - RNA, 22 nt, synthetic construct
  source 1..22: mol_type = other RNA
atgcaaccacaggacatcgtct

SEQ ID NO: 793 - RNA, 22 nt, synthetic construct
  source 1..22: mol_type = other RNA
tcgagtgaacacctgtgaggtt

SEQ ID NO: 794 - RNA, 22 nt, synthetic construct
  source 1..22: mol_type = other RNA
atcggaggaacttgcttaagtt

SEQ ID NO: 795 - RNA, 22 nt, synthetic construct
  source 1..22: mol_type = other RNA
acgtagactgagcttggtgatt

SEQ ID NO: 796 - RNA, 22 nt, synthetic construct
  source 1..22: mol_type = other RNA
accgactccggggaagaatcct

SEQ ID NO: 797 - RNA, 22 nt, synthetic construct
  source 1..22: mol_type = other RNA
aagattccacaggcagggtact

SEQ ID NO: 798 - RNA, 22 nt, synthetic construct
  source 1..22: mol_type = other RNA
agcattacataagacattatct

SEQ ID NO: 799 - RNA, 22 nt, synthetic construct
  source 1..22: mol_type = other RNA
agcattacataagacattatct

SEQ ID NO: 800 - RNA, 22 nt, synthetic construct
  source 1..22: mol_type = other RNA
agcattacataagacattatct

SEQ ID NO: 801 - RNA, 23 nt, synthetic construct
  source 1..23: mol_type = other RNA
acatcaatgaagggtacgttgtt

SEQ ID NO: 802 - RNA, 22 nt, synthetic construct
  source 1..22: mol_type = other RNA
agcattacataagacattatct

SEQ ID NO: 803 - RNA, 22 nt, synthetic construct
  source 1..22: mol_type = other RNA
aggcatatctggaagccatgtt

SEQ ID NO: 804 - RNA, 22 nt, synthetic construct
  source 1..22: mol_type = other RNA
acatcaatgaagggtacgttgt

SEQ ID NO: 805 - RNA, 22 nt, synthetic construct
  source 1..22: mol_type = other RNA
acatcaatgaagggtacgttgt

SEQ ID NO: 806 - RNA, 21 nt, synthetic construct
  source 1..21: mol_type = other RNA
acatcaatgaagggtacgttg

SEQ ID NO: 807 - RNA, 20 nt, synthetic construct
  source 1..20: mol_type = other RNA
atcaatgaagggtacgttgt

SEQ ID NO: 808 - RNA, 20 nt, synthetic construct
  source 1..20: mol_type = other RNA
atcaatgaagggtacgttgt

SEQ ID NO: 809 - RNA, 23 nt, synthetic construct
  source 1..23: mol_type = other RNA
acatcaatgaagggtacgttgtt

SEQ ID NO: 810 - RNA, 23 nt, synthetic construct
  source 1..23: mol_type = other RNA
acatcaatgaagggtacgttgtt

SEQ ID NO: 811 - RNA, 23 nt, synthetic construct
  source 1..23: mol_type = other RNA
acatcaatgaagggtacgttgtt

SEQ ID NO: 812 - RNA, 23 nt, synthetic construct
  source 1..23: mol_type = other RNA
acatcaatgaagggtacgttgtt

SEQ ID NO: 813 - RNA, 21 nt, synthetic construct
  source 1..21: mol_type = other RNA
acatcaatgaagggtacgttt

SEQ ID NO: 814 - RNA, 21 nt, synthetic construct
  source 1..21: mol_type = other RNA
acatcaatgaagggtacgttt

SEQ ID NO: 815 - RNA, 23 nt, synthetic construct
  source 1..23: mol_type = other RNA
acatcaatgaagggtacgttgtt

SEQ ID NO: 816 - RNA, 23 nt, synthetic construct
  source 1..23: mol_type = other RNA
aggcatatctggaagccatgttt

SEQ ID NO: 817-1068 - skipped (252 entries)

SEQ ID NO: 1069 - RNA, 20 nt, synthetic construct
  source 1..20: mol_type = other RNA
agctgctgcggatcaggacc

SEQ ID NO: 1070 - RNA, 20 nt, synthetic construct
  source 1..20: mol_type = other RNA
ctgctgcggatcaggacccg

SEQ ID NO: 1071 - RNA, 20 nt, synthetic construct
  source 1..20: mol_type = other RNA
cggatcaggacccgagccga

SEQ ID NO: 1072 - RNA, 20 nt, synthetic construct
  source 1..20: mol_type = other RNA
ggatcaggacccgagccgat

SEQ ID NO: 1073 - RNA, 20 nt, synthetic construct
  source 1..20: mol_type = other RNA
cagagcgcggctggagcttg

SEQ ID NO: 1074 - RNA, 20 nt, synthetic construct
  source 1..20: mol_type = other RNA
agagcgcggctggagcttgt

SEQ ID NO: 1075 - RNA, 20 nt, synthetic construct
  source 1..20: mol_type = other RNA
gagcgcggctggagcttgtc

SEQ ID NO: 1076 - RNA, 20 nt, synthetic construct
  source 1..20: mol_type = other RNA
agcgcggctggagcttgtcc

SEQ ID NO: 1077 - RNA, 20 nt, synthetic construct
  source 1..20: mol_type = other RNA
cggctggagcttgtccttcg

SEQ ID NO: 1078 - RNA, 20 nt, synthetic construct
  source 1..20: mol_type = other RNA
ggctggagcttgtccttcgc

SEQ ID NO: 1079 - RNA, 20 nt, synthetic construct
  source 1..20: mol_type = other RNA
gctggagcttgtccttcgcg

SEQ ID NO: 1080 - RNA, 20 nt, synthetic construct
  source 1..20: mol_type = other RNA
gcttgtccttcgcgggctgc

SEQ ID NO: 1081 - RNA, 20 nt, synthetic construct
  source 1..20: mol_type = other RNA
cttgtccttcgcgggctgcg

SEQ ID NO: 1082 - RNA, 20 nt, synthetic construct
  source 1..20: mol_type = other RNA
tcctgggcttctaccacgtc

SEQ ID NO: 1083 - RNA, 20 nt, synthetic construct
  source 1..20: mol_type = other RNA
cctgggcttctaccacgtcg

SEQ ID NO: 1084 - RNA, 20 nt, synthetic construct
  source 1..20: mol_type = other RNA
ctgggcttctaccacgtcgg

SEQ ID NO: 1085 - RNA, 20 nt, synthetic construct
  source 1..20: mol_type = other RNA
tgggcttctaccacgtcggg

SEQ ID NO: 1086 - RNA, 20 nt, synthetic construct
  source 1..20: mol_type = other RNA
ggcttctaccacgtcggggc

SEQ ID NO: 1087 - RNA, 20 nt, synthetic construct
  source 1..20: mol_type = other RNA
gcttctaccacgtcggggcg

SEQ ID NO: 1088 - RNA, 20 nt, synthetic construct
  source 1..20: mol_type = other RNA
ttctaccacgtcggggcgac

SEQ ID NO: 1089 - RNA, 20 nt, synthetic construct
  source 1..20: mol_type = other RNA
tctaccacgtcggggcgacc

SEQ ID NO: 1090 - RNA, 20 nt, synthetic construct
  source 1..20: mol_type = other RNA
ctaccacgtcggggcgaccc

SEQ ID NO: 1091 - RNA, 20 nt, synthetic construct
  source 1..20: mol_type = other RNA
taccacgtcggggcgacccg

SEQ ID NO: 1092 - RNA, 20 nt, synthetic construct
  source 1..20: mol_type = other RNA
cgctgcctgagcgagcacgc

SEQ ID NO: 1093 - RNA, 20 nt, synthetic construct
  source 1..20: mol_type = other RNA
agcgagcacgccccgcacct

SEQ ID NO: 1094 - RNA, 20 nt, synthetic construct
  source 1..20: mol_type = other RNA
ccccgcacctcctccgcgac

SEQ ID NO: 1095 - RNA, 20 nt, synthetic construct
  source 1..20: mol_type = other RNA
ccgcacctcctccgcgacgc

SEQ ID NO: 1096 - RNA, 20 nt, synthetic construct
  source 1..20: mol_type = other RNA
cgcacctcctccgcgacgcg

SEQ ID NO: 1097 - RNA, 20 nt, synthetic construct
  source 1..20: mol_type = other RNA
ctccgcgacgcgcgcatgtt

SEQ ID NO: 1098 - RNA, 20 nt, synthetic construct
  source 1..20: mol_type = other RNA
tccgcgacgcgcgcatgttg

SEQ ID NO: 1099 - RNA, 20 nt, synthetic construct
  source 1..20: mol_type = other RNA
cgcgacgcgcgcatgttgtt

SEQ ID NO: 1100 - RNA, 20 nt, synthetic construct
  source 1..20: mol_type = other RNA
gcgacgcgcgcatgttgttc

SEQ ID NO: 1101 - RNA, 20 nt, synthetic construct
  source 1..20: mol_type = other RNA
cgacgcgcgcatgttgttcg

SEQ ID NO: 1102 - RNA, 20 nt, synthetic construct
  source 1..20: mol_type = other RNA
acgcgcgcatgttgttcggc

SEQ ID NO: 1103 - RNA, 20 nt, synthetic construct
  source 1..20: mol_type = other RNA
gcttcggccggggcgttgca

SEQ ID NO: 1104 - RNA, 20 nt, synthetic construct
  source 1..20: mol_type = other RNA
ggccggggcgttgcactgcg

SEQ ID NO: 1105 - RNA, 20 nt, synthetic construct
  source 1..20: mol_type = other RNA
gccggggcgttgcactgcgt

SEQ ID NO: 1106 - RNA, 20 nt, synthetic construct
  source 1..20: mol_type = other RNA
ccggggcgttgcactgcgtc

SEQ ID NO: 1107 - RNA, 20 nt, synthetic construct
  source 1..20: mol_type = other RNA
cggggcgttgcactgcgtcg

SEQ ID NO: 1108 - RNA, 20 nt, synthetic construct
  source 1..20: mol_type = other RNA
ggggcgttgcactgcgtcgg

SEQ ID NO: 1109 - RNA, 20 nt, synthetic construct
  source 1..20: mol_type = other RNA
gggcgttgcactgcgtcggc

SEQ ID NO: 1110 - RNA, 20 nt, synthetic construct
  source 1..20: mol_type = other RNA
ggcgttgcactgcgtcggcg

SEQ ID NO: 1111 - RNA, 20 nt, synthetic construct
  source 1..20: mol_type = other RNA
gcgttgcactgcgtcggcgt

SEQ ID NO: 1112 - RNA, 20 nt, synthetic construct
  source 1..20: mol_type = other RNA
gttgcactgcgtcggcgtcc

SEQ ID NO: 1113 - RNA, 20 nt, synthetic construct
  source 1..20: mol_type = other RNA
ttgcactgcgtcggcgtcct

SEQ ID NO: 1114 - RNA, 20 nt, synthetic construct
  source 1..20: mol_type = other RNA
cactgcgtcggcgtcctctc

SEQ ID NO: 1115 - RNA, 20 nt, synthetic construct
  source 1..20: mol_type = other RNA
gtatcccgctggagcagact

SEQ ID NO: 1116 - RNA, 20 nt, synthetic construct
  source 1..20: mol_type = other RNA
gcaggtcctctcagatcttg

SEQ ID NO: 1117 - RNA, 20 nt, synthetic construct
  source 1..20: mol_type = other RNA
caggtcctctcagatcttgt

SEQ ID NO: 1118 - RNA, 20 nt, synthetic construct
  source 1..20: mol_type = other RNA
tgcggaaggccaggagtcgg

SEQ ID NO: 1119 - RNA, 20 nt, synthetic construct
  source 1..20: mol_type = other RNA
gcggaaggccaggagtcgga

SEQ ID NO: 1120 - RNA, 20 nt, synthetic construct
  source 1..20: mol_type = other RNA
cggaaggccaggagtcggaa

SEQ ID NO: 1121 - RNA, 20 nt, synthetic construct
  source 1..20: mol_type = other RNA
ggaaggccaggagtcggaac

SEQ ID NO: 1122 - RNA, 20 nt, synthetic construct
  source 1..20: mol_type = other RNA
gaaggccaggagtcggaaca

SEQ ID NO: 1123 - RNA, 20 nt, synthetic construct
  source 1..20: mol_type = other RNA
aaggccaggagtcggaacat

SEQ ID NO: 1124 - RNA, 20 nt, synthetic construct
  source 1..20: mol_type = other RNA
gccaggagtcggaacattgg

SEQ ID NO: 1125 - RNA, 20 nt, synthetic construct
  source 1..20: mol_type = other RNA
ctcccggccaatgtccacca

SEQ ID NO: 1126 - RNA, 20 nt, synthetic construct
  source 1..20: mol_type = other RNA
tgtctgatggggaaaacgtt

SEQ ID NO: 1127 - RNA, 20 nt, synthetic construct
  source 1..20: mol_type = other RNA
gtctgatggggaaaacgttc

SEQ ID NO: 1128 - RNA, 20 nt, synthetic construct
  source 1..20: mol_type = other RNA
tctgatggggaaaacgttct

SEQ ID NO: 1129 - RNA, 20 nt, synthetic construct
  source 1..20: mol_type = other RNA
gatggggaaaacgttctggt

SEQ ID NO: 1130 - RNA, 20 nt, synthetic construct
  source 1..20: mol_type = other RNA
tggggaaaacgttctggtgt

SEQ ID NO: 1131 - RNA, 20 nt, synthetic construct
  source 1..20: mol_type = other RNA
ggggaaaacgttctggtgtc

SEQ ID NO: 1132 - RNA, 20 nt, synthetic construct
  source 1..20: mol_type = other RNA
gggaaaacgttctggtgtct

SEQ ID NO: 1133 - RNA, 20 nt, synthetic construct
  source 1..20: mol_type = other RNA
aaaacgttctggtgtctgac

SEQ ID NO: 1134 - RNA, 20 nt, synthetic construct
  source 1..20: mol_type = other RNA
aaacgttctggtgtctgact

SEQ ID NO: 1135 - RNA, 20 nt, synthetic construct
  source 1..20: mol_type = other RNA
cggtccaaagacgaagtcgt

SEQ ID NO: 1136 - RNA, 20 nt, synthetic construct
  source 1..20: mol_type = other RNA
ggtccaaagacgaagtcgtg

SEQ ID NO: 1137 - RNA, 20 nt, synthetic construct
  source 1..20: mol_type = other RNA
tccaaagacgaagtcgtgga

SEQ ID NO: 1138 - RNA, 20 nt, synthetic construct
  source 1..20: mol_type = other RNA
caaagacgaagtcgtggatg

SEQ ID NO: 1139 - RNA, 20 nt, synthetic construct
  source 1..20: mol_type = other RNA
ttctacagtggccttatccc

SEQ ID NO: 1140 - RNA, 20 nt, synthetic construct
  source 1..20: mol_type = other RNA
ctccttccttcagaggcgtg

SEQ ID NO: 1141 - RNA, 20 nt, synthetic construct
  source 1..20: mol_type = other RNA
tccttccttcagaggcgtgc

SEQ ID NO: 1142 - RNA, 20 nt, synthetic construct
  source 1..20: mol_type = other RNA
ccttccttcagaggcgtgcg

SEQ ID NO: 1143 - RNA, 20 nt, synthetic construct
  source 1..20: mol_type = other RNA
cttccttcagaggcgtgcga

SEQ ID NO: 1144 - RNA, 20 nt, synthetic construct
  source 1..20: mol_type = other RNA
ttccttcagaggcgtgcgat

SEQ ID NO: 1145 - RNA, 20 nt, synthetic construct
  source 1..20: mol_type = other RNA
tccttcagaggcgtgcgata

SEQ ID NO: 1146 - RNA, 20 nt, synthetic construct
  source 1..20: mol_type = other RNA
ccttcagaggcgtgcgatat

SEQ ID NO: 1147 - RNA, 20 nt, synthetic construct
  source 1..20: mol_type = other RNA
cttcagaggcgtgcgatatg

SEQ ID NO: 1148 - RNA, 20 nt, synthetic construct
  source 1..20: mol_type = other RNA
tcagaggcgtgcgatatgtg

SEQ ID NO: 1149 - RNA, 20 nt, synthetic construct
  source 1..20: mol_type = other RNA
agaggcgtgcgatatgtgga

SEQ ID NO: 1150 - RNA, 20 nt, synthetic construct
  source 1..20: mol_type = other RNA
aggcgtgcgatatgtggatg

SEQ ID NO: 1151 - RNA, 20 nt, synthetic construct
  source 1..20: mol_type = other RNA
gcgtgcgatatgtggatgga

SEQ ID NO: 1152 - RNA, 20 nt, synthetic construct
  source 1..20: mol_type = other RNA
gcgatatgtggatggaggag

SEQ ID NO: 1153 - RNA, 20 nt, synthetic construct
  source 1..20: mol_type = other RNA
gtgagtgacaacgtaccctt

SEQ ID NO: 1154 - RNA, 20 nt, synthetic construct
  source 1..20: mol_type = other RNA
agtgacaacgtacccttcat

SEQ ID NO: 1155 - RNA, 20 nt, synthetic construct
  source 1..20: mol_type = other RNA
gtgacaacgtacccttcatt

SEQ ID NO: 1156 - RNA, 20 nt, synthetic construct
  source 1..20: mol_type = other RNA
tgacaacgtacccttcattg

SEQ ID NO: 1157 - RNA, 20 nt, synthetic construct
  source 1..20: mol_type = other RNA
gacaacgtacccttcattga

SEQ ID NO: 1158 - RNA, 20 nt, synthetic construct
  source 1..20: mol_type = other RNA
acaacgtacccttcattgat

SEQ ID NO: 1159 - RNA, 20 nt, synthetic construct
  source 1..20: mol_type = other RNA
caacgtacccttcattgatg

SEQ ID NO: 1160 - RNA, 20 nt, synthetic construct
  source 1..20: mol_type = other RNA
acgtacccttcattgatgcc

SEQ ID NO: 1161 - RNA, 20 nt, synthetic construct
  source 1..20: mol_type = other RNA
atggggagtacgacatctgc

SEQ ID NO: 1162 - RNA, 20 nt, synthetic construct
  source 1..20: mol_type = other RNA
tggggagtacgacatctgcc

SEQ ID NO: 1163 - RNA, 20 nt, synthetic construct
  source 1..20: mol_type = other RNA
agtacgacatctgccctaaa

SEQ ID NO: 1164 - RNA, 20 nt, synthetic construct
  source 1..20: mol_type = other RNA
tacgacatctgccctaaagt

SEQ ID NO: 1165 - RNA, 20 nt, synthetic construct
  source 1..20: mol_type = other RNA
acgacatctgccctaaagtc

SEQ ID NO: 1166 - RNA, 20 nt, synthetic construct
  source 1..20: mol_type = other RNA
cgacatctgccctaaagtca

SEQ ID NO: 1167 - RNA, 20 nt, synthetic construct
  source 1..20: mol_type = other RNA
gacatctgccctaaagtcaa

SEQ ID NO: 1168 - RNA, 20 nt, synthetic construct
  source 1..20: mol_type = other RNA
acatctgccctaaagtcaag

SEQ ID NO: 1169 - RNA, 20 nt, synthetic construct
  source 1..20: mol_type = other RNA
catctgccctaaagtcaagt

SEQ ID NO: 1170 - RNA, 20 nt, synthetic construct
  source 1..20: mol_type = other RNA
atctgccctaaagtcaagtc

SEQ ID NO: 1171 - RNA, 20 nt, synthetic construct
  source 1..20: mol_type = other RNA
tgtggacatcaccaagctca

SEQ ID NO: 1172 - RNA, 20 nt, synthetic construct
  source 1..20: mol_type = other RNA
cctctgcacagggaacctct

SEQ ID NO: 1173 - RNA, 20 nt, synthetic construct
  source 1..20: mol_type = other RNA
gcttttgtccccccggatct

SEQ ID NO: 1174 - RNA, 20 nt, synthetic construct
  source 1..20: mol_type = other RNA
cttttgtccccccggatctc

SEQ ID NO: 1175 - RNA, 20 nt, synthetic construct
  source 1..20: mol_type = other RNA
ttttgtccccccggatctca

SEQ ID NO: 1176 - RNA, 20 nt, synthetic construct
  source 1..20: mol_type = other RNA
tttgtccccccggatctcaa

SEQ ID NO: 1177 - RNA, 20 nt, synthetic construct
  source 1..20: mol_type = other RNA
ttgtccccccggatctcaag

SEQ ID NO: 1178 - RNA, 20 nt, synthetic construct
  source 1..20: mol_type = other RNA
ccggatctcaaggtgctggg

SEQ ID NO: 1179 - RNA, 20 nt, synthetic construct
  source 1..20: mol_type = other RNA
caaggtgctgggagagatat

SEQ ID NO: 1180 - RNA, 20 nt, synthetic construct
  source 1..20: mol_type = other RNA
aaggtgctgggagagatatg

SEQ ID NO: 1181 - RNA, 20 nt, synthetic construct
  source 1..20: mol_type = other RNA
ggtgctgggagagatatgcc

SEQ ID NO: 1182 - RNA, 20 nt, synthetic construct
  source 1..20: mol_type = other RNA
ctgggagagatatgccttcg

SEQ ID NO: 1183 - RNA, 20 nt, synthetic construct
  source 1..20: mol_type = other RNA
tgggagagatatgccttcga

SEQ ID NO: 1184 - RNA, 20 nt, synthetic construct
  source 1..20: mol_type = other RNA
gggagagatatgccttcgag

SEQ ID NO: 1185 - RNA, 20 nt, synthetic construct
  source 1..20: mol_type = other RNA
ggagagatatgccttcgagg

SEQ ID NO: 1186 - RNA, 20 nt, synthetic construct
  source 1..20: mol_type = other RNA
agagatatgccttcgaggat

SEQ ID NO: 1187 - RNA, 20 nt, synthetic construct
  source 1..20: mol_type = other RNA
gagatatgccttcgaggata

SEQ ID NO: 1188 - RNA, 20 nt, synthetic construct
  source 1..20: mol_type = other RNA
atatgccttcgaggatattt

SEQ ID NO: 1189 - RNA, 20 nt, synthetic construct
  source 1..20: mol_type = other RNA
atgccttcgaggatatttgg

SEQ ID NO: 1190 - RNA, 20 nt, synthetic construct
  source 1..20: mol_type = other RNA
tgccttcgaggatatttgga

SEQ ID NO: 1191 - RNA, 20 nt, synthetic construct
  source 1..20: mol_type = other RNA
tggaagagaagggcatctgc

SEQ ID NO: 1192 - RNA, 20 nt, synthetic construct
  source 1..20: mol_type = other RNA
ctgctagaccacctgcgtct

SEQ ID NO: 1193 - RNA, 20 nt, synthetic construct
  source 1..20: mol_type = other RNA
accacctgcgtctcagcatc

SEQ ID NO: 1194 - RNA, 20 nt, synthetic construct
  source 1..20: mol_type = other RNA
acctgcgtctcagcatcctg

SEQ ID NO: 1195 - RNA, 20 nt, synthetic construct
  source 1..20: mol_type = other RNA
ctgccctgggatgagagcat

SEQ ID NO: 1196 - RNA, 20 nt, synthetic construct
  source 1..20: mol_type = other RNA
cctgggatgagagcatcctg

SEQ ID NO: 1197 - RNA, 20 nt, synthetic construct
  source 1..20: mol_type = other RNA
gtggatacatgagcaagatt

SEQ ID NO: 1198 - RNA, 20 nt, synthetic construct
  source 1..20: mol_type = other RNA
tggatacatgagcaagattt

SEQ ID NO: 1199 - RNA, 20 nt, synthetic construct
  source 1..20: mol_type = other RNA
caagatttgcaacttgctac

SEQ ID NO: 1200 - RNA, 20 nt, synthetic construct
  source 1..20: mol_type = other RNA
ttgcaacttgctacccatta

SEQ ID NO: 1201 - RNA, 20 nt, synthetic construct
  source 1..20: mol_type = other RNA
tgcaacttgctacccattag

SEQ ID NO: 1202 - RNA, 20 nt, synthetic construct
  source 1..20: mol_type = other RNA
gcaacttgctacccattagg

SEQ ID NO: 1203 - RNA, 20 nt, synthetic construct
  source 1..20: mol_type = other RNA
aacttgctacccattaggat

SEQ ID NO: 1204 - RNA, 20 nt, synthetic construct
  source 1..20: mol_type = other RNA
acttgctacccattaggata

SEQ ID NO: 1205 - RNA, 20 nt, synthetic construct
  source 1..20: mol_type = other RNA
cttgctacccattaggataa

SEQ ID NO: 1206 - RNA, 20 nt, synthetic construct
  source 1..20: mol_type = other RNA
ttgctacccattaggataat

SEQ ID NO: 1207 - RNA, 20 nt, synthetic construct
  source 1..20: mol_type = other RNA
gaatctgccattgcgattgt

SEQ ID NO: 1208 - RNA, 20 nt, synthetic construct
  source 1..20: mol_type = other RNA
attgcgattgtccagagact

SEQ ID NO: 1209 - RNA, 20 nt, synthetic construct
  source 1..20: mol_type = other RNA
ttgtccagagactggtgaca

SEQ ID NO: 1210 - RNA, 20 nt, synthetic construct
  source 1..20: mol_type = other RNA
ccagagactggtgacatggc

SEQ ID NO: 1211 - RNA, 20 nt, synthetic construct
  source 1..20: mol_type = other RNA
gtgacatggcttccagatat

SEQ ID NO: 1212 - RNA, 20 nt, synthetic construct
  source 1..20: mol_type = other RNA
tgacatggcttccagatatg

SEQ ID NO: 1213 - RNA, 20 nt, synthetic construct
  source 1..20: mol_type = other RNA
gacatggcttccagatatgc

SEQ ID NO: 1214 - RNA, 20 nt, synthetic construct
  source 1..20: mol_type = other RNA
ggcttccagatatgcccgac

SEQ ID NO: 1215 - RNA, 20 nt, synthetic construct
  source 1..20: mol_type = other RNA
gcttccagatatgcccgacg

SEQ ID NO: 1216 - RNA, 20 nt, synthetic construct
  source 1..20: mol_type = other RNA
cttccagatatgcccgacga

SEQ ID NO: 1217 - RNA, 20 nt, synthetic construct
  source 1..20: mol_type = other RNA
ttccagatatgcccgacgat

SEQ ID NO: 1218 - RNA, 20 nt, synthetic construct
  source 1..20: mol_type = other RNA
tccagatatgcccgacgatg

SEQ ID NO: 1219 - RNA, 20 nt, synthetic construct
  source 1..20: mol_type = other RNA
ccagatatgcccgacgatgt

SEQ ID NO: 1220 - RNA, 20 nt, synthetic construct
  source 1..20: mol_type = other RNA
cagtgggtgacctcacaggt

SEQ ID NO: 1221 - RNA, 20 nt, synthetic construct
  source 1..20: mol_type = other RNA
ccccgcctccaggtcccaaa

SEQ ID NO: 1222 - RNA, 20 nt, synthetic construct
  source 1..20: mol_type = other RNA
cgcctccaggtcccaaatgc

SEQ ID NO: 1223 - RNA, 20 nt, synthetic construct
  source 1..20: mol_type = other RNA
gccaacaggcctccccatgc

SEQ ID NO: 1224 - RNA, 20 nt, synthetic construct
  source 1..20: mol_type = other RNA
ggctctccacctttcccagt

SEQ ID NO: 1225 - RNA, 20 nt, synthetic construct
  source 1..20: mol_type = other RNA
ccacctttcccagtttttca

SEQ ID NO: 1226 - RNA, 20 nt, synthetic construct
  source 1..20: mol_type = other RNA
cacctttcccagtttttcac

SEQ ID NO: 1227 - RNA, 20 nt, synthetic construct
  source 1..20: mol_type = other RNA
acctttcccagtttttcact

SEQ ID NO: 1228 - RNA, 20 nt, synthetic construct
  source 1..20: mol_type = other RNA
attctttcagaggtgctaaa

SEQ ID NO: 1229 - RNA, 20 nt, synthetic construct
  source 1..20: mol_type = other RNA
ccagcctctgagctgagttg

SEQ ID NO: 1230 - RNA, 20 nt, synthetic construct
  source 1..20: mol_type = other RNA
gcctctgagctgagttggtt

SEQ ID NO: 1231 - RNA, 20 nt, synthetic construct
  source 1..20: mol_type = other RNA
tctgagctgagttggtttta

SEQ ID NO: 1232 - RNA, 20 nt, synthetic construct
  source 1..20: mol_type = other RNA
gagctgagttggttttatga

SEQ ID NO: 1233 - RNA, 20 nt, synthetic construct
  source 1..20: mol_type = other RNA
agctgagttggttttatgaa

SEQ ID NO: 1234 - RNA, 20 nt, synthetic construct
  source 1..20: mol_type = other RNA
gctgagttggttttatgaaa

SEQ ID NO: 1235 - RNA, 20 nt, synthetic construct
  source 1..20: mol_type = other RNA
ttggttttatgaaaagctag

SEQ ID NO: 1236 - RNA, 20 nt, synthetic construct
  source 1..20: mol_type = other RNA
ttttatgaaaagctaggaag

SEQ ID NO: 1237 - RNA, 20 nt, synthetic construct
  source 1..20: mol_type = other RNA
aattcagctggttgggaaat

SEQ ID NO: 1238 - RNA, 20 nt, synthetic construct
  source 1..20: mol_type = other RNA
attcagctggttgggaaatg

SEQ ID NO: 1239 - RNA, 20 nt, synthetic construct
  source 1..20: mol_type = other RNA
cagctggttgggaaatgaca

SEQ ID NO: 1240 - RNA, 20 nt, synthetic construct
  source 1..20: mol_type = other RNA
gctggttgggaaatgacacc

SEQ ID NO: 1241 - RNA, 20 nt, synthetic construct
  source 1..20: mol_type = other RNA
cagagggtcccttactgact

SEQ ID NO: 1242 - RNA, 20 nt, synthetic construct
  source 1..20: mol_type = other RNA
ggccctattaatggtcagac

SEQ ID NO: 1243 - RNA, 20 nt, synthetic construct
  source 1..20: mol_type = other RNA
gccctattaatggtcagact

SEQ ID NO: 1244 - RNA, 20 nt, synthetic construct
  source 1..20: mol_type = other RNA
atgtgtgatcttgtggggtg

SEQ ID NO: 1245 - RNA, 20 nt, synthetic construct
  source 1..20: mol_type = other RNA
tgtgtgatcttgtggggtgg

SEQ ID NO: 1246 - RNA, 20 nt, synthetic construct
  source 1..20: mol_type = other RNA
gtgtgatcttgtggggtgga

SEQ ID NO: 1247 - RNA, 20 nt, synthetic construct
  source 1..20: mol_type = other RNA
aacacctttttcacctaact

SEQ ID NO: 1248 - RNA, 20 nt, synthetic construct
  source 1..20: mol_type = other RNA
gagctgctgcggatcaggac

SEQ ID NO: 1249 - RNA, 20 nt, synthetic construct
  source 1..20: mol_type = other RNA
gtacgacatctgccctaaag

SEQ ID NO: 1250 - RNA, 20 nt, synthetic construct
  source 1..20: mol_type = other RNA
tgctagaccacctgcgtctc

SEQ ID NO: 1251 - RNA, 20 nt, synthetic construct
  source 1..20: mol_type = other RNA
gaaagacaaaggtggataca

SEQ ID NO: 1252 - RNA, 20 nt, synthetic construct
  source 1..20: mol_type = other RNA
gagcaagatttgcaacttgc

SEQ ID NO: 1253 - RNA, 20 nt, synthetic construct
  source 1..20: mol_type = other RNA
atttgcaacttgctacccat

SEQ ID NO: 1254 - RNA, 20 nt, synthetic construct
  source 1..20: mol_type = other RNA
gagagatatgccttcgagga

SEQ ID NO: 1255 - RNA, 20 nt, synthetic construct
  source 1..20: mol_type = other RNA
agctgctagaccacctgcgt

SEQ ID NO: 1256 - RNA, 20 nt, synthetic construct
  source 1..20: mol_type = other RNA
acacctttttcacctaacta

SEQ ID NO: 1257 - RNA, 20 nt, synthetic construct
  source 1..20: mol_type = other RNA
cacctttttcacctaactaa

SEQ ID NO: 1258 - RNA, 20 nt, synthetic construct
  source 1..20: mol_type = other RNA
acctttttcacctaactaaa

SEQ ID NO: 1259 - RNA, 20 nt, synthetic construct
  source 1..20: mol_type = other RNA
cctttttcacctaactaaaa

SEQ ID NO: 1260 - RNA, 20 nt, synthetic construct
  source 1..20: mol_type = other RNA
ctttttcacctaactaaaat

SEQ ID NO: 1261 - RNA, 20 nt, synthetic construct
  source 1..20: mol_type = other RNA
ttttcacctaactaaaataa

SEQ ID NO: 1262 - RNA, 20 nt, synthetic construct
  source 1..20: mol_type = other RNA
taaaataatgtttaaagagt

SEQ ID NO: 1263 - RNA, 20 nt, synthetic construct
  source 1..20: mol_type = other RNA
tggtctgcgttctttttttc

SEQ ID NO: 1264 - RNA, 20 nt, synthetic construct
  source 1..20: mol_type = other RNA
ggtctgcgttctttttttct

SEQ ID NO: 1265 - RNA, 20 nt, synthetic construct
  source 1..20: mol_type = other RNA
tctccttgcatcttctcatt

SEQ ID NO: 1266 - RNA, 20 nt, synthetic construct
  source 1..20: mol_type = other RNA
ctccttgcatcttctcattc

SEQ ID NO: 1267 - RNA, 20 nt, synthetic construct
  source 1..20: mol_type = other RNA
tccttgcatcttctcattct

SEQ ID NO: 1268 - RNA, 20 nt, synthetic construct
  source 1..20: mol_type = other RNA
ccttgcatcttctcattctc

SEQ ID NO: 1269 - RNA, 20 nt, synthetic construct
  source 1..20: mol_type = other RNA
ctctgatcaccccaacctct

SEQ ID NO: 1270 - RNA, 20 nt, synthetic construct
  source 1..20: mol_type = other RNA
caccccaacctctctctgtc

SEQ ID NO: 1271 - RNA, 20 nt, synthetic construct
  source 1..20: mol_type = other RNA
gccagccttgatggagacaa

SEQ ID NO: 1272 - RNA, 20 nt, synthetic construct
  source 1..20: mol_type = other RNA
cagccttgatggagacaagc

SEQ ID NO: 1273 - RNA, 20 nt, synthetic construct
  source 1..20: mol_type = other RNA
agccttgatggagacaagcc

SEQ ID NO: 1274 - RNA, 20 nt, synthetic construct
  source 1..20: mol_type = other RNA
cttgatggagacaagccctt

SEQ ID NO: 1275 - RNA, 20 nt, synthetic construct
  source 1..20: mol_type = other RNA
ttgatggagacaagcccttg

SEQ ID NO: 1276 - RNA, 20 nt, synthetic construct
  source 1..20: mol_type = other RNA
gatggagacaagcccttgag

SEQ ID NO: 1277 - RNA, 20 nt, synthetic construct
  source 1..20: mol_type = other RNA
tggagacaagcccttgagac

SEQ ID NO: 1278 - RNA, 20 nt, synthetic construct
  source 1..20: mol_type = other RNA
caaggtcagtgtaatatgac

SEQ ID NO: 1279 - RNA, 20 nt, synthetic construct
  source 1..20: mol_type = other RNA
aaggtcagtgtaatatgact

SEQ ID NO: 1280 - RNA, 20 nt, synthetic construct
  source 1..20: mol_type = other RNA
ggtcagtgtaatatgactga

SEQ ID NO: 1281 - RNA, 20 nt, synthetic construct
  source 1..20: mol_type = other RNA
ttttttctatttatgcattt

SEQ ID NO: 1282 - RNA, 20 nt, synthetic construct
  source 1..20: mol_type = other RNA
gtgtgctcaaactgttaaat

SEQ ID NO: 1283 - RNA, 20 nt, synthetic construct
  source 1..20: mol_type = other RNA
ttaaatgttggaaaagaaag

SEQ ID NO: 1284 - RNA, 20 nt, synthetic construct
  source 1..20: mol_type = other RNA
cagacaaagcacttgactga

SEQ ID NO: 1285 - RNA, 20 nt, synthetic construct
  source 1..20: mol_type = other RNA
taaaggaaacgggttctagg

SEQ ID NO: 1286 - RNA, 20 nt, synthetic construct
  source 1..20: mol_type = other RNA
aaaggaaacgggttctaggg

SEQ ID NO: 1287 - RNA, 20 nt, synthetic construct
  source 1..20: mol_type = other RNA
aggaaacgggttctagggac

SEQ ID NO: 1288 - RNA, 20 nt, synthetic construct
  source 1..20: mol_type = other RNA
aaacgggttctagggacaaa

SEQ ID NO: 1289 - RNA, 20 nt, synthetic construct
  source 1..20: mol_type = other RNA
acgggttctagggacaaact

SEQ ID NO: 1290 - RNA, 20 nt, synthetic construct
  source 1..20: mol_type = other RNA
cgggttctagggacaaactc

SEQ ID NO: 1291 - RNA, 20 nt, synthetic construct
  source 1..20: mol_type = other RNA
gggttctagggacaaactct

SEQ ID NO: 1292 - RNA, 20 nt, synthetic construct
  source 1..20: mol_type = other RNA
ggttctagggacaaactcta

SEQ ID NO: 1293 - RNA, 20 nt, synthetic construct
  source 1..20: mol_type = other RNA
ccgtgaactctttgagaaaa

SEQ ID NO: 1294 - RNA, 20 nt, synthetic construct
  source 1..20: mol_type = other RNA
gtgaactctttgagaaaaga

SEQ ID NO: 1295 - RNA, 20 nt, synthetic construct
  source 1..20: mol_type = other RNA
ctctttgagaaaagaggcta

SEQ ID NO: 1296 - RNA, 20 nt, synthetic construct
  source 1..20: mol_type = other RNA
ctttgagaaaagaggctact

SEQ ID NO: 1297 - RNA, 20 nt, synthetic construct
  source 1..20: mol_type = other RNA
gaaaagaggctacttgtgaa

SEQ ID NO: 1298 - RNA, 20 nt, synthetic construct
  source 1..20: mol_type = other RNA
aagaggctacttgtgaaaat

SEQ ID NO: 1299 - RNA, 20 nt, synthetic construct
  source 1..20: mol_type = other RNA
agaggctacttgtgaaaata

SEQ ID NO: 1300 - RNA, 20 nt, synthetic construct
  source 1..20: mol_type = other RNA
gggtttgaacctgccttctt

SEQ ID NO: 1301 - RNA, 20 nt, synthetic construct
  source 1..20: mol_type = other RNA
tttgaacctgccttcttaca

SEQ ID NO: 1302 - RNA, 20 nt, synthetic construct
  source 1..20: mol_type = other RNA
acctgccttcttacatcttg

SEQ ID NO: 1303 - RNA, 20 nt, synthetic construct
  source 1..20: mol_type = other RNA
cctgccttcttacatcttga

SEQ ID NO: 1304 - RNA, 20 nt, synthetic construct
  source 1..20: mol_type = other RNA
ctgccttcttacatcttgag

SEQ ID NO: 1305 - RNA, 20 nt, synthetic construct
  source 1..20: mol_type = other RNA
tgccttcttacatcttgagg

SEQ ID NO: 1306 - RNA, 20 nt, synthetic construct
  source 1..20: mol_type = other RNA
gccttcttacatcttgaggg

SEQ ID NO: 1307 - RNA, 20 nt, synthetic construct
  source 1..20: mol_type = other RNA
ctaagtgagttcccaaggcc

SEQ ID NO: 1308 - RNA, 20 nt, synthetic construct
  source 1..20: mol_type = other RNA
agtgagttcccaaggcctct

SEQ ID NO: 1309 - RNA, 20 nt, synthetic construct
  source 1..20: mol_type = other RNA
gagttcccaaggcctctgtt

SEQ ID NO: 1310 - RNA, 20 nt, synthetic construct
  source 1..20: mol_type = other RNA
agttcccaaggcctctgttc

SEQ ID NO: 1311 - RNA, 20 nt, synthetic construct
  source 1..20: mol_type = other RNA
gttcccaaggcctctgttca

SEQ ID NO: 1312 - RNA, 20 nt, synthetic construct
  source 1..20: mol_type = other RNA
ctccgtcagtgagctcaggt

SEQ ID NO: 1313 - RNA, 20 nt, synthetic construct
  source 1..20: mol_type = other RNA
acccccaaccccaccgggtg

SEQ ID NO: 1314 - RNA, 20 nt, synthetic construct
  source 1..20: mol_type = other RNA
cccccaaccccaccgggtgt

SEQ ID NO: 1315 - RNA, 20 nt, synthetic construct
  source 1..20: mol_type = other RNA
ccccaaccccaccgggtgtc

SEQ ID NO: 1316 - RNA, 20 nt, synthetic construct
  source 1..20: mol_type = other RNA
cccaaccccaccgggtgtca

SEQ ID NO: 1317 - RNA, 20 nt, synthetic construct
  source 1..20: mol_type = other RNA
cccaccgggtgtcagagcaa

SEQ ID NO: 1318 - RNA, 20 nt, synthetic construct
  source 1..20: mol_type = other RNA
ccccatggagctggaatggg

SEQ ID NO: 1319 - RNA, 20 nt, synthetic construct
  source 1..20: mol_type = other RNA
atggagctggaatggggtgg

SEQ ID NO: 1320 - RNA, 20 nt, synthetic construct
  source 1..20: mol_type = other RNA
tggagctggaatggggtgga

SEQ ID NO: 1321 - RNA, 20 nt, synthetic construct
  source 1..20: mol_type = other RNA
ggagctggaatggggtggag

SEQ ID NO: 1322 - RNA, 20 nt, synthetic construct
  source 1..20: mol_type = other RNA
aaggaaagttacaagtttct

SEQ ID NO: 1323 - RNA, 20 nt, synthetic construct
  source 1..20: mol_type = other RNA
gaaagttacaagtttctttt

SEQ ID NO: 1324 - RNA, 20 nt, synthetic construct
  source 1..20: mol_type = other RNA
aaagttacaagtttcttttc

SEQ ID NO: 1325 - RNA, 20 nt, synthetic construct
  source 1..20: mol_type = other RNA
gttacaagtttcttttccca

SEQ ID NO: 1326 - RNA, 20 nt, synthetic construct
  source 1..20: mol_type = other RNA
caagtttcttttcccaagtt

SEQ ID NO: 1327 - RNA, 20 nt, synthetic construct
  source 1..20: mol_type = other RNA
aagtttcttttcccaagttt

SEQ ID NO: 1328 - RNA, 20 nt, synthetic construct
  source 1..20: mol_type = other RNA
ttcttttcccaagtttccca

SEQ ID NO: 1329 - RNA, 20 nt, synthetic construct
  source 1..20: mol_type = other RNA
acgccttcggtcattagcag

SEQ ID NO: 1330 - RNA, 20 nt, synthetic construct
  source 1..20: mol_type = other RNA
gcccggccaacagtattttc

SEQ ID NO: 1331 - RNA, 20 nt, synthetic construct
  source 1..20: mol_type = other RNA
cccggccaacagtattttct

SEQ ID NO: 1332 - RNA, 20 nt, synthetic construct
  source 1..20: mol_type = other RNA
ccggccaacagtattttcta

SEQ ID NO: 1333 - RNA, 20 nt, synthetic construct
  source 1..20: mol_type = other RNA
cggccaacagtattttctaa

SEQ ID NO: 1334 - RNA, 20 nt, synthetic construct
  source 1..20: mol_type = other RNA
ggccaacagtattttctaat

SEQ ID NO: 1335 - RNA, 20 nt, synthetic construct
  source 1..20: mol_type = other RNA
gccaacagtattttctaata

SEQ ID NO: 1336 - RNA, 20 nt, synthetic construct
  source 1..20: mol_type = other RNA
ggtattgtgattgttatcag

SEQ ID NO: 1337 - RNA, 20 nt, synthetic construct
  source 1..20: mol_type = other RNA
gtattgtgattgttatcagg

SEQ ID NO: 1338 - RNA, 20 nt, synthetic construct
  source 1..20: mol_type = other RNA
tgtgattgttatcaggaaaa

SEQ ID NO: 1339 - RNA, 20 nt, synthetic construct
  source 1..20: mol_type = other RNA
gtgattgttatcaggaaaaa

SEQ ID NO: 1340 - RNA, 20 nt, synthetic construct
  source 1..20: mol_type = other RNA
gattgttatcaggaaaaaat

SEQ ID NO: 1341 - RNA, 20 nt, synthetic construct
  source 1..20: mol_type = other RNA
attgttatcaggaaaaaata

SEQ ID NO: 1342 - RNA, 20 nt, synthetic construct
  source 1..20: mol_type = other RNA
tgttatcaggaaaaaatata

SEQ ID NO: 1343 - RNA, 20 nt, synthetic construct
  source 1..20: mol_type = other RNA
ggacgtattttctttctgct

SEQ ID NO: 1344 - RNA, 20 nt, synthetic construct
  source 1..20: mol_type = other RNA
tctgcttttaaaaattattc

SEQ ID NO: 1345 - RNA, 20 nt, synthetic construct
  source 1..20: mol_type = other RNA
attagtgggttggctgaggc

SEQ ID NO: 1346 - RNA, 20 nt, synthetic construct
  source 1..20: mol_type = other RNA
gtatcaagataaggaaatca

SEQ ID NO: 1347 - RNA, 20 nt, synthetic construct
  source 1..20: mol_type = other RNA
atcaagataaggaaatcagg

SEQ ID NO: 1348 - RNA, 20 nt, synthetic construct
  source 1..20: mol_type = other RNA
agataaggaaatcaggaagt

SEQ ID NO: 1349 - RNA, 20 nt, synthetic construct
  source 1..20: mol_type = other RNA
gataaggaaatcaggaagtg

SEQ ID NO: 1350 - RNA, 20 nt, synthetic construct
  source 1..20: mol_type = other RNA
taaggaaatcaggaagtgta

SEQ ID NO: 1351 - RNA, 20 nt, synthetic construct
  source 1..20: mol_type = other RNA
aaggaaatcaggaagtgtaa

SEQ ID NO: 1352 - RNA, 20 nt, synthetic construct
  source 1..20: mol_type = other RNA
attcttatagaaatggccaa

SEQ ID NO: 1353 - RNA, 20 nt, synthetic construct
  source 1..20: mol_type = other RNA
ttcttatagaaatggccaag

SEQ ID NO: 1354 - RNA, 20 nt, synthetic construct
  source 1..20: mol_type = other RNA
cctcagatgctacccaatcc

SEQ ID NO: 1355 - RNA, 20 nt, synthetic construct
  source 1..20: mol_type = other RNA
ctcagatgctacccaatccc

SEQ ID NO: 1356 - RNA, 20 nt, synthetic construct
  source 1..20: mol_type = other RNA
ctgtccctccagaaggcacc

SEQ ID NO: 1357 - RNA, 20 nt, synthetic construct
  source 1..20: mol_type = other RNA
tgtccctccagaaggcaccc

SEQ ID NO: 1358 - RNA, 20 nt, synthetic construct
  source 1..20: mol_type = other RNA
gtccctccagaaggcaccct

SEQ ID NO: 1359 - RNA, 20 nt, synthetic construct
  source 1..20: mol_type = other RNA
tccctccagaaggcaccctt

SEQ ID NO: 1360 - RNA, 20 nt, synthetic construct
  source 1..20: mol_type = other RNA
ccctccagaaggcacccttt

SEQ ID NO: 1361 - RNA, 20 nt, synthetic construct
  source 1..20: mol_type = other RNA
cctccagaaggcaccctttg

SEQ ID NO: 1362 - RNA, 20 nt, synthetic construct
  source 1..20: mol_type = other RNA
ctccagaaggcaccctttgc

SEQ ID NO: 1363 - RNA, 20 nt, synthetic construct
  source 1..20: mol_type = other RNA
ccagaaggcaccctttgctt

SEQ ID NO: 1364 - RNA, 20 nt, synthetic construct
  source 1..20: mol_type = other RNA
gaaggcaccctttgcttagg

SEQ ID NO: 1365 - RNA, 20 nt, synthetic construct
  source 1..20: mol_type = other RNA
aaggcaccctttgcttaggc

SEQ ID NO: 1366 - RNA, 20 nt, synthetic construct
  source 1..20: mol_type = other RNA
aggcaccctttgcttaggcc

SEQ ID NO: 1367 - RNA, 20 nt, synthetic construct
  source 1..20: mol_type = other RNA
gcttaggcctccctctcttc

SEQ ID NO: 1368 - RNA, 20 nt, synthetic construct
  source 1..20: mol_type = other RNA
tctcttcctgaaccacctct

SEQ ID NO: 1369 - RNA, 20 nt, synthetic construct
  source 1..20: mol_type = other RNA
attggcctatgaatgcattc

SEQ ID NO: 1370 - RNA, 20 nt, synthetic construct
  source 1..20: mol_type = other RNA
gcctatgaatgcattcttat

SEQ ID NO: 1371 - RNA, 20 nt, synthetic construct
  source 1..20: mol_type = other RNA
cctatgaatgcattcttatt

SEQ ID NO: 1372 - RNA, 20 nt, synthetic construct
  source 1..20: mol_type = other RNA
ggggtcaagccatcttccca

SEQ ID NO: 1373 - RNA, 20 nt, synthetic construct
  source 1..20: mol_type = other RNA
gctaccatgcctggtccaac

SEQ ID NO: 1374 - RNA, 20 nt, synthetic construct
  source 1..20: mol_type = other RNA
ccatgcctggtccaacattc

SEQ ID NO: 1375 - RNA, 20 nt, synthetic construct
  source 1..20: mol_type = other RNA
ctggtccaacattcttcatt

SEQ ID NO: 1376 - RNA, 20 nt, synthetic construct
  source 1..20: mol_type = other RNA
ttagtgcagagtatgagcct

SEQ ID NO: 1377 - RNA, 20 nt, synthetic construct
  source 1..20: mol_type = other RNA
agtgcagagtatgagcctga

SEQ ID NO: 1378 - RNA, 20 nt, synthetic construct
  source 1..20: mol_type = other RNA
gtgcagagtatgagcctgat

SEQ ID NO: 1379 - RNA, 20 nt, synthetic construct
  source 1..20: mol_type = other RNA
tgtgggtgtgtatatgtatc

SEQ ID NO: 1380 - RNA, 20 nt, synthetic construct
  source 1..20: mol_type = other RNA
tgagtgtatataaaaagact

SEQ ID NO: 1381 - RNA, 20 nt, synthetic construct
  source 1..20: mol_type = other RNA
agtgtatataaaaagactga

SEQ ID NO: 1382 - RNA, 20 nt, synthetic construct
  source 1..20: mol_type = other RNA
gtgtatataaaaagactgaa

SEQ ID NO: 1383 - RNA, 20 nt, synthetic construct
  source 1..20: mol_type = other RNA
tatataaaaagactgaaaga

SEQ ID NO: 1384 - RNA, 20 nt, synthetic construct
  source 1..20: mol_type = other RNA
aagactgaaagagggctggg

SEQ ID NO: 1385 - RNA, 20 nt, synthetic construct
  source 1..20: mol_type = other RNA
agactgaaagagggctgggc

SEQ ID NO: 1386 - RNA, 20 nt, synthetic construct
  source 1..20: mol_type = other RNA
ttgcagtgacccgagatgca

SEQ ID NO: 1387 - RNA, 20 nt, synthetic construct
  source 1..20: mol_type = other RNA
taaggatatatatcaaaacc

SEQ ID NO: 1388 - RNA, 20 nt, synthetic construct
  source 1..20: mol_type = other RNA
ggatatatatcaaaaccctt

SEQ ID NO: 1389 - RNA, 20 nt, synthetic construct
  source 1..20: mol_type = other RNA
atatatatcaaaacccttat

SEQ ID NO: 1390 - RNA, 20 nt, synthetic construct
  source 1..20: mol_type = other RNA
tatatatcaaaacccttatg

SEQ ID NO: 1391 - RNA, 20 nt, synthetic construct
  source 1..20: mol_type = other RNA
atatatcaaaacccttatgg

SEQ ID NO: 1392 - RNA, 20 nt, synthetic construct
  source 1..20: mol_type = other RNA
tatatcaaaacccttatggc

SEQ ID NO: 1393 - RNA, 20 nt, synthetic construct
  source 1..20: mol_type = other RNA
gcagactgttatttgtaatt

SEQ ID NO: 1394 - RNA, 20 nt, synthetic construct
  source 1..20: mol_type = other RNA
cgattcccgatcccgaccca

SEQ ID NO: 1395 - RNA, 20 nt, synthetic construct
  source 1..20: mol_type = other RNA
cccgatcccgacccagatcc

SEQ ID NO: 1396 - RNA, 20 nt, synthetic construct
  source 1..20: mol_type = other RNA
gcgacccgctgcctgagcga

SEQ ID NO: 1397 - RNA, 20 nt, synthetic construct
  source 1..20: mol_type = other RNA
acccgctgcctgagcgagca

SEQ ID NO: 1398 - RNA, 20 nt, synthetic construct
  source 1..20: mol_type = other RNA
ccaggagtcggaacattggc

SEQ ID NO: 1399 - RNA, 20 nt, synthetic construct
  source 1..20: mol_type = other RNA
aggagtcggaacattggcat

SEQ ID NO: 1400 - RNA, 20 nt, synthetic construct
  source 1..20: mol_type = other RNA
ggagtcggaacattggcatc

SEQ ID NO: 1401 - RNA, 20 nt, synthetic construct
  source 1..20: mol_type = other RNA
gagtcggaacattggcatct

SEQ ID NO: 1402 - RNA, 20 nt, synthetic construct
  source 1..20: mol_type = other RNA
ctttcggtccaaagacgaag

SEQ ID NO: 1403 - RNA, 20 nt, synthetic construct
  source 1..20: mol_type = other RNA
ccttcattgatgccaaaaca

SEQ ID NO: 1404 - RNA, 20 nt, synthetic construct
  source 1..20: mol_type = other RNA
cttcattgatgccaaaacaa

SEQ ID NO: 1405 - RNA, 20 nt, synthetic construct
  source 1..20: mol_type = other RNA
ttcattgatgccaaaacaac

SEQ ID NO: 1406 - RNA, 20 nt, synthetic construct
  source 1..20: mol_type = other RNA
cattgatgccaaaacaacca

SEQ ID NO: 1407 - RNA, 20 nt, synthetic construct
  source 1..20: mol_type = other RNA
tgatgccaaaacaaccatca

SEQ ID NO: 1408 - RNA, 20 nt, synthetic construct
  source 1..20: mol_type = other RNA
gatgccaaaacaaccatcac

SEQ ID NO: 1409 - RNA, 20 nt, synthetic construct
  source 1..20: mol_type = other RNA
atgccaaaacaaccatcacc

SEQ ID NO: 1410 - RNA, 20 nt, synthetic construct
  source 1..20: mol_type = other RNA
aaacaaccatcaccgtgtcc

SEQ ID NO: 1411 - RNA, 20 nt, synthetic construct
  source 1..20: mol_type = other RNA
aacaaccatcaccgtgtccc

SEQ ID NO: 1412 - RNA, 20 nt, synthetic construct
  source 1..20: mol_type = other RNA
agcatcctggacaccctctc

SEQ ID NO: 1413 - RNA, 20 nt, synthetic construct
  source 1..20: mol_type = other RNA
gcatcctggacaccctctcg

SEQ ID NO: 1414 - RNA, 20 nt, synthetic construct
  source 1..20: mol_type = other RNA
gctcgctacagcactgagtg

SEQ ID NO: 1415 - RNA, 20 nt, synthetic construct
  source 1..20: mol_type = other RNA
ctggttgggaaatgacacca

SEQ ID NO: 1416 - RNA, 20 nt, synthetic construct
  source 1..20: mol_type = other RNA
ggttgggaaatgacaccagg

SEQ ID NO: 1417 - RNA, 20 nt, synthetic construct
  source 1..20: mol_type = other RNA
ttaattttagaacacctttt

SEQ ID NO: 1418 - RNA, 20 nt, synthetic construct
  source 1..20: mol_type = other RNA
aattttagaacacctttttc

SEQ ID NO: 1419 - RNA, 20 nt, synthetic construct
  source 1..20: mol_type = other RNA
attttagaacacctttttca

SEQ ID NO: 1420 - RNA, 20 nt, synthetic construct
  source 1..20: mol_type = other RNA
ttttagaacacctttttcac

SEQ ID NO: 1421 - RNA, 20 nt, synthetic construct
  source 1..20: mol_type = other RNA
ttagaacacctttttcacct

SEQ ID NO: 1422 - RNA, 20 nt, synthetic construct
  source 1..20: mol_type = other RNA
ctgttgaattttgtattatg

SEQ ID NO: 1423 - RNA, 20 nt, synthetic construct
  source 1..20: mol_type = other RNA
tgttgaattttgtattatgt

SEQ ID NO: 1424 - RNA, 20 nt, synthetic construct
  source 1..20: mol_type = other RNA
gttgaattttgtattatgtg

SEQ ID NO: 1425 - RNA, 20 nt, synthetic construct
  source 1..20: mol_type = other RNA
aattttgtattatgtgaatc

SEQ ID NO: 1426 - RNA, 20 nt, synthetic construct
  source 1..20: mol_type = other RNA
attttgtattatgtgaatca

SEQ ID NO: 1427 - RNA, 20 nt, synthetic construct
  source 1..20: mol_type = other RNA
aaaataatctagtgtgcagg

SEQ ID NO: 1428 - RNA, 20 nt, synthetic construct
  source 1..20: mol_type = other RNA
ttttccccaggtgtgataat

SEQ ID NO: 1429 - RNA, 20 nt, synthetic construct
  source 1..20: mol_type = other RNA
tgagaagacagaccctttaa

SEQ ID NO: 1430 - RNA, 20 nt, synthetic construct
  source 1..20: mol_type = other RNA
gagaagacagaccctttaaa

SEQ ID NO: 1431 - RNA, 20 nt, synthetic construct
  source 1..20: mol_type = other RNA
gaagacagaccctttaaagg

SEQ ID NO: 1432 - RNA, 20 nt, synthetic construct
  source 1..20: mol_type = other RNA
aagacagaccctttaaagga

SEQ ID NO: 1433 - RNA, 20 nt, synthetic construct
  source 1..20: mol_type = other RNA
agacagaccctttaaaggaa

SEQ ID NO: 1434 - RNA, 20 nt, synthetic construct
  source 1..20: mol_type = other RNA
gacagaccctttaaaggaaa

SEQ ID NO: 1435 - RNA, 20 nt, synthetic construct
  source 1..20: mol_type = other RNA
agaaaataactcctaataaa

SEQ ID NO: 1436 - RNA, 20 nt, synthetic construct
  source 1..20: mol_type = other RNA
gagaaaataactcctaataa

SEQ ID NO: 1437 - RNA, 20 nt, synthetic construct
  source 1..20: mol_type = other RNA
tgagaaaataactcctaata

SEQ ID NO: 1438 - RNA, 20 nt, synthetic construct
  source 1..20: mol_type = other RNA
atgagaaaataactcctaat

SEQ ID NO: 1439 - RNA, 20 nt, synthetic construct
  source 1..20: mol_type = other RNA
tttcagcatgagaaaataac

SEQ ID NO: 1440 - RNA, 20 nt, synthetic construct
  source 1..20: mol_type = other RNA
atcactttcagcatgagaaa

SEQ ID NO: 1441 - RNA, 20 nt, synthetic construct
  source 1..20: mol_type = other RNA
catcactttcagcatgagaa

SEQ ID NO: 1442 - RNA, 20 nt, synthetic construct
  source 1..20: mol_type = other RNA
gcatcactttcagcatgaga

SEQ ID NO: 1443 - RNA, 20 nt, synthetic construct
  source 1..20: mol_type = other RNA
cccaagtttctatggtgaac

SEQ ID NO: 1444 - RNA, 20 nt, synthetic construct
  source 1..20: mol_type = other RNA
gcccaagtttctatggtgaa

SEQ ID NO: 1445 - RNA, 20 nt, synthetic construct
  source 1..20: mol_type = other RNA
ttgcccaagtttctatggtg

SEQ ID NO: 1446 - RNA, 20 nt, synthetic construct
  source 1..20: mol_type = other RNA
gttgcccaagtttctatggt

SEQ ID NO: 1447 - RNA, 20 nt, synthetic construct
  source 1..20: mol_type = other RNA
gtgttgcccaagtttctatg

SEQ ID NO: 1448 - RNA, 20 nt, synthetic construct
  source 1..20: mol_type = other RNA
tgtgttgcccaagtttctat

SEQ ID NO: 1449 - RNA, 20 nt, synthetic construct
  source 1..20: mol_type = other RNA
atgtgttgcccaagtttcta

SEQ ID NO: 1450 - RNA, 20 nt, synthetic construct
  source 1..20: mol_type = other RNA
tatgtgttgcccaagtttct

SEQ ID NO: 1451 - RNA, 20 nt, synthetic construct
  source 1..20: mol_type = other RNA
gtattttatttgtcgtgctt

SEQ ID NO: 1452 - RNA, 20 nt, synthetic construct
  source 1..20: mol_type = other RNA
tgtattttatttgtcgtgct

SEQ ID NO: 1453 - RNA, 20 nt, synthetic construct
  source 1..20: mol_type = other RNA
ttgtattttatttgtcgtgc

SEQ ID NO: 1454 - RNA, 20 nt, synthetic construct
  source 1..20: mol_type = other RNA
attgtattttatttgtcgtg

SEQ ID NO: 1455 - RNA, 20 nt, synthetic construct
  source 1..20: mol_type = other RNA
aattgtattttatttgtcgt

SEQ ID NO: 1456 - RNA, 20 nt, synthetic construct
  source 1..20: mol_type = other RNA
cctggtccaacattcttcat

SEQ ID NO: 1457 - RNA, 20 nt, synthetic construct
  source 1..20: mol_type = other RNA
catgcctggtccaacattct

SEQ ID NO: 1458 - RNA, 20 nt, synthetic construct
  source 1..20: mol_type = other RNA
ctaccatgcctggtccaaca

SEQ ID NO: 1459 - RNA, 20 nt, synthetic construct
  source 1..20: mol_type = other RNA
tgcttaggcctccctctctt

SEQ ID NO: 1460 - RNA, 20 nt, synthetic construct
  source 1..20: mol_type = other RNA
tcagatgctacccaatcccg

SEQ ID NO: 1461 - RNA, 20 nt, synthetic construct
  source 1..20: mol_type = other RNA
gacaaagcacttgactgaga

SEQ ID NO: 1462 - RNA, 20 nt, synthetic construct
  source 1..20: mol_type = other RNA
cccttacccatattgtgtaa

SEQ ID NO: 1463 - RNA, 20 nt, synthetic construct
  source 1..20: mol_type = other RNA
gtgctcaaactgttaaatgt

SEQ ID NO: 1464 - RNA, 20 nt, synthetic construct
  source 1..20: mol_type = other RNA
tctggtctgcgttctttttt

SEQ ID NO: 1465 - RNA, 20 nt, synthetic construct
  source 1..20: mol_type = other RNA
gttatttgtaattgtatttt

SEQ ID NO: 1466 - RNA, 20 nt, synthetic construct
  source 1..20: mol_type = other RNA
aggcggcaacattctttttt

SEQ ID NO: 1467 - RNA, 20 nt, synthetic construct
  source 1..20: mol_type = other RNA
caggaataatcagtatgtag

SEQ ID NO: 1468 - RNA, 20 nt, synthetic construct
  source 1..20: mol_type = other RNA
tcaggaataatcagtatgta

SEQ ID NO: 1469 - RNA, 20 nt, synthetic construct
  source 1..20: mol_type = other RNA
ctcaggaataatcagtatgt

SEQ ID NO: 1470 - RNA, 20 nt, synthetic construct
  source 1..20: mol_type = other RNA
ctctcaggaataatcagtat

SEQ ID NO: 1471 - RNA, 20 nt, synthetic construct
  source 1..20: mol_type = other RNA
actctcaggaataatcagta

SEQ ID NO: 1472 - RNA, 20 nt, synthetic construct
  source 1..20: mol_type = other RNA
taaagccttccctttaattt

SEQ ID NO: 1473 - RNA, 20 nt, synthetic construct
  source 1..20: mol_type = other RNA
ataaagccttccctttaatt

SEQ ID NO: 1474 - RNA, 20 nt, synthetic construct
  source 1..20: mol_type = other RNA
aataaagccttccctttaat

SEQ ID NO: 1475 - RNA, 20 nt, synthetic construct
  source 1..20: mol_type = other RNA
aaataaagccttccctttaa

SEQ ID NO: 1476 - RNA, 20 nt, synthetic construct
  source 1..20: mol_type = other RNA
caaataaagccttcccttta

SEQ ID NO: 1477 - RNA, 20 nt, synthetic construct
  source 1..20: mol_type = other RNA
tcttcctgaaccacctctgg

SEQ ID NO: 1478 - RNA, 20 nt, synthetic construct
  source 1..20: mol_type = other RNA
atatattaaatggctgatag

SEQ ID NO: 1479 - RNA, 20 nt, synthetic construct
  source 1..20: mol_type = other RNA
ccacgtggcctccttgtgac

SEQ ID NO: 1480 - RNA, 20 nt, synthetic construct
  source 1..20: mol_type = other RNA
cgtgggcctgttctcttgat

SEQ ID NO: 1481 - RNA, 20 nt, synthetic construct
  source 1..20: mol_type = other RNA
acagaccctttaaaggaaac

SEQ ID NO: 1482 - RNA, 20 nt, synthetic construct
  source 1..20: mol_type = other RNA
cggggcgacccgctgcctga

SEQ ID NO: 1483 - RNA, 20 nt, synthetic construct
  source 1..20: mol_type = other RNA
acgtcggggcgacccgctgc

SEQ ID NO: 1484 - RNA, 20 nt, synthetic construct
  source 1..20: mol_type = other RNA
cacgtcggggcgacccgctg

SEQ ID NO: 1485 - RNA, 20 nt, synthetic construct
  source 1..20: mol_type = other RNA
tcccgatcccgacccagatc

SEQ ID NO: 1486 - RNA, 20 nt, synthetic construct
  source 1..20: mol_type = other RNA
tggtccgaggggggcggggc

SEQ ID NO: 1487 - RNA, 20 nt, synthetic construct
  source 1..20: mol_type = other RNA
atggtccgaggggggcgggg

SEQ ID NO: 1488 - RNA, 20 nt, synthetic construct
  source 1..20: mol_type = other RNA
tcctctccggtatcccgctg

SEQ ID NO: 1489 - RNA, 20 nt, synthetic construct
  source 1..20: mol_type = other RNA
caaatgcctcccggccaatg

SEQ ID NO: 1490 - RNA, 20 nt, synthetic construct
  source 1..20: mol_type = other RNA
tccaccagctcatctccggc

SEQ ID NO: 1491 - RNA, 20 nt, synthetic construct
  source 1..20: mol_type = other RNA
ccaccagctcatctccggca

SEQ ID NO: 1492 - RNA, 20 nt, synthetic construct
  source 1..20: mol_type = other RNA
caccagctcatctccggcaa

SEQ ID NO: 1493 - RNA, 20 nt, synthetic construct
  source 1..20: mol_type = other RNA
accagctcatctccggcaaa

SEQ ID NO: 1494 - RNA, 20 nt, synthetic construct
  source 1..20: mol_type = other RNA
ccagctcatctccggcaaaa

SEQ ID NO: 1495 - RNA, 20 nt, synthetic construct
  source 1..20: mol_type = other RNA
cagctcatctccggcaaaat

SEQ ID NO: 1496 - RNA, 20 nt, synthetic construct
  source 1..20: mol_type = other RNA
catctctcttaccagagtgt

SEQ ID NO: 1497 - RNA, 20 nt, synthetic construct
  source 1..20: mol_type = other RNA
tctctcttaccagagtgtct

SEQ ID NO: 1498 - RNA, 20 nt, synthetic construct
  source 1..20: mol_type = other RNA
tctcttaccagagtgtctga

SEQ ID NO: 1499 - RNA, 20 nt, synthetic construct
  source 1..20: mol_type = other RNA
gttctggtgtctgactttcg

SEQ ID NO: 1500 - RNA, 20 nt, synthetic construct
  source 1..20: mol_type = other RNA
ttctggtgtctgactttcgg

SEQ ID NO: 1501 - RNA, 20 nt, synthetic construct
  source 1..20: mol_type = other RNA
tctggtgtctgactttcggt

SEQ ID NO: 1502 - RNA, 20 nt, synthetic construct
  source 1..20: mol_type = other RNA
tggtgtctgactttcggtcc

SEQ ID NO: 1503 - RNA, 20 nt, synthetic construct
  source 1..20: mol_type = other RNA
tgactttcggtccaaagacg

SEQ ID NO: 1504 - RNA, 20 nt, synthetic construct
  source 1..20: mol_type = other RNA
gactttcggtccaaagacga

SEQ ID NO: 1505 - RNA, 20 nt, synthetic construct
  source 1..20: mol_type = other RNA
actttcggtccaaagacgaa

SEQ ID NO: 1506 - RNA, 20 nt, synthetic construct
  source 1..20: mol_type = other RNA
aagtcgtggatgccttggta

SEQ ID NO: 1507 - RNA, 20 nt, synthetic construct
  source 1..20: mol_type = other RNA
agtcgtggatgccttggtat

SEQ ID NO: 1508 - RNA, 20 nt, synthetic construct
  source 1..20: mol_type = other RNA
gtcgtggatgccttggtatg

SEQ ID NO: 1509 - RNA, 20 nt, synthetic construct
  source 1..20: mol_type = other RNA
ccttggtatgttcctgcttc

SEQ ID NO: 1510 - RNA, 20 nt, synthetic construct
  source 1..20: mol_type = other RNA
ggatggaggagtgagtgaca

SEQ ID NO: 1511 - RNA, 20 nt, synthetic construct
  source 1..20: mol_type = other RNA
tggaggagtgagtgacaacg

SEQ ID NO: 1512 - RNA, 20 nt, synthetic construct
  source 1..20: mol_type = other RNA
ggaggagtgagtgacaacgt

SEQ ID NO: 1513 - RNA, 20 nt, synthetic construct
  source 1..20: mol_type = other RNA
gaggagtgagtgacaacgta

SEQ ID NO: 1514 - RNA, 20 nt, synthetic construct
  source 1..20: mol_type = other RNA
aggagtgagtgacaacgtac

SEQ ID NO: 1515 - RNA, 20 nt, synthetic construct
  source 1..20: mol_type = other RNA
cctaaagtcaagtccacgaa

SEQ ID NO: 1516 - RNA, 20 nt, synthetic construct
  source 1..20: mol_type = other RNA
ctaaagtcaagtccacgaac

SEQ ID NO: 1517 - RNA, 20 nt, synthetic construct
  source 1..20: mol_type = other RNA
taaagtcaagtccacgaact

SEQ ID NO: 1518 - RNA, 20 nt, synthetic construct
  source 1..20: mol_type = other RNA
agtcaagtccacgaactttc

SEQ ID NO: 1519 - RNA, 20 nt, synthetic construct
  source 1..20: mol_type = other RNA
agtccacgaactttcttcat

SEQ ID NO: 1520 - RNA, 20 nt, synthetic construct
  source 1..20: mol_type = other RNA
tccacgaactttcttcatgt

SEQ ID NO: 1521 - RNA, 20 nt, synthetic construct
  source 1..20: mol_type = other RNA
tggacatcaccaagctcagt

SEQ ID NO: 1522 - RNA, 20 nt, synthetic construct
  source 1..20: mol_type = other RNA
catcaccaagctcagtctac

SEQ ID NO: 1523 - RNA, 20 nt, synthetic construct
  source 1..20: mol_type = other RNA
tcaccaagctcagtctacgc

SEQ ID NO: 1524 - RNA, 20 nt, synthetic construct
  source 1..20: mol_type = other RNA
caccaagctcagtctacgcc

SEQ ID NO: 1525 - RNA, 20 nt, synthetic construct
  source 1..20: mol_type = other RNA
caagctcagtctacgcctct

SEQ ID NO: 1526 - RNA, 20 nt, synthetic construct
  source 1..20: mol_type = other RNA
gaacctctaccttctctcga

SEQ ID NO: 1527 - RNA, 20 nt, synthetic construct
  source 1..20: mol_type = other RNA
aacctctaccttctctcgag

SEQ ID NO: 1528 - RNA, 20 nt, synthetic construct
  source 1..20: mol_type = other RNA
ctctaccttctctcgagagc

SEQ ID NO: 1529 - RNA, 20 nt, synthetic construct
  source 1..20: mol_type = other RNA
ccttctctcgagagcttttg

SEQ ID NO: 1530 - RNA, 20 nt, synthetic construct
  source 1..20: mol_type = other RNA
cttctctcgagagcttttgt

SEQ ID NO: 1531 - RNA, 20 nt, synthetic construct
  source 1..20: mol_type = other RNA
ttctctcgagagcttttgtc

SEQ ID NO: 1532 - RNA, 20 nt, synthetic construct
  source 1..20: mol_type = other RNA
tctctcgagagcttttgtcc

SEQ ID NO: 1533 - RNA, 20 nt, synthetic construct
  source 1..20: mol_type = other RNA
gccttcgaggatatttggat

SEQ ID NO: 1534 - RNA, 20 nt, synthetic construct
  source 1..20: mol_type = other RNA
ccttcgaggatatttggatg

SEQ ID NO: 1535 - RNA, 20 nt, synthetic construct
  source 1..20: mol_type = other RNA
ttcgaggatatttggatgca

SEQ ID NO: 1536 - RNA, 20 nt, synthetic construct
  source 1..20: mol_type = other RNA
gaggatatttggatgcattc

SEQ ID NO: 1537 - RNA, 20 nt, synthetic construct
  source 1..20: mol_type = other RNA
atatttggatgcattcaggt

SEQ ID NO: 1538 - RNA, 20 nt, synthetic construct
  source 1..20: mol_type = other RNA
atttggatgcattcaggttc

SEQ ID NO: 1539 - RNA, 20 nt, synthetic construct
  source 1..20: mol_type = other RNA
tttggatgcattcaggttct

SEQ ID NO: 1540 - RNA, 20 nt, synthetic construct
  source 1..20: mol_type = other RNA
gatgcattcaggttcttgga

SEQ ID NO: 1541 - RNA, 20 nt, synthetic construct
  source 1..20: mol_type = other RNA
atcctcagaagggatggatc

SEQ ID NO: 1542 - RNA, 20 nt, synthetic construct
  source 1..20: mol_type = other RNA
tcagaagggatggatcctga

SEQ ID NO: 1543 - RNA, 20 nt, synthetic construct
  source 1..20: mol_type = other RNA
gaagggatggatcctgaggt

SEQ ID NO: 1544 - RNA, 20 nt, synthetic construct
  source 1..20: mol_type = other RNA
gggatggatcctgaggtcgc

SEQ ID NO: 1545 - RNA, 20 nt, synthetic construct
  source 1..20: mol_type = other RNA
ggtcgccatgcccagctggg

SEQ ID NO: 1546 - RNA, 20 nt, synthetic construct
  source 1..20: mol_type = other RNA
ctggattcttccccggagtc

SEQ ID NO: 1547 - RNA, 20 nt, synthetic construct
  source 1..20: mol_type = other RNA
attcttccccggagtcggct

SEQ ID NO: 1548 - RNA, 20 nt, synthetic construct
  source 1..20: mol_type = other RNA
ctacccattaggataatgtc

SEQ ID NO: 1549 - RNA, 20 nt, synthetic construct
  source 1..20: mol_type = other RNA
tacccattaggataatgtct

SEQ ID NO: 1550 - RNA, 20 nt, synthetic construct
  source 1..20: mol_type = other RNA
ttaggataatgtcttatgta

SEQ ID NO: 1551 - RNA, 20 nt, synthetic construct
  source 1..20: mol_type = other RNA
taggataatgtcttatgtaa

SEQ ID NO: 1552 - RNA, 20 nt, synthetic construct
  source 1..20: mol_type = other RNA
gataatgtcttatgtaatgc

SEQ ID NO: 1553 - RNA, 20 nt, synthetic construct
  source 1..20: mol_type = other RNA
tatgtaatgctgccctgtac

SEQ ID NO: 1554 - RNA, 20 nt, synthetic construct
  source 1..20: mol_type = other RNA
gtaccctgcctgtggaatct

SEQ ID NO: 1555 - RNA, 20 nt, synthetic construct
  source 1..20: mol_type = other RNA
accctgcctgtggaatctgc

SEQ ID NO: 1556 - RNA, 20 nt, synthetic construct
  source 1..20: mol_type = other RNA
ccctgcctgtggaatctgcc

SEQ ID NO: 1557 - RNA, 20 nt, synthetic construct
  source 1..20: mol_type = other RNA
agatatgcccgacgatgtcc

SEQ ID NO: 1558 - RNA, 20 nt, synthetic construct
  source 1..20: mol_type = other RNA
tgttcactcgagtgctgatg

SEQ ID NO: 1559 - RNA, 20 nt, synthetic construct
  source 1..20: mol_type = other RNA
actcgagtgctgatgtgtct

SEQ ID NO: 1560 - RNA, 20 nt, synthetic construct
  source 1..20: mol_type = other RNA
aatgccagtgagcagccaac

SEQ ID NO: 1561 - RNA, 20 nt, synthetic construct
  source 1..20: mol_type = other RNA
ccatgcacacctgagcagga

SEQ ID NO: 1562 - RNA, 20 nt, synthetic construct
  source 1..20: mol_type = other RNA
cacacctgagcaggactggc

SEQ ID NO: 1563 - RNA, 20 nt, synthetic construct
  source 1..20: mol_type = other RNA
agcagagaccaaagcagagg

SEQ ID NO: 1564 - RNA, 20 nt, synthetic construct
  source 1..20: mol_type = other RNA
agcagaggccaccccgcggt

SEQ ID NO: 1565 - RNA, 20 nt, synthetic construct
  source 1..20: mol_type = other RNA
gcagaggccaccccgcggtc

SEQ ID NO: 1566 - RNA, 20 nt, synthetic construct
  source 1..20: mol_type = other RNA
ctgaacttcttcttgggcaa

SEQ ID NO: 1567 - RNA, 20 nt, synthetic construct
  source 1..20: mol_type = other RNA
tgaacttcttcttgggcaat

SEQ ID NO: 1568 - RNA, 20 nt, synthetic construct
  source 1..20: mol_type = other RNA
aacttcttcttgggcaataa

SEQ ID NO: 1569 - RNA, 20 nt, synthetic construct
  source 1..20: mol_type = other RNA
acttcttcttgggcaataaa

SEQ ID NO: 1570 - RNA, 20 nt, synthetic construct
  source 1..20: mol_type = other RNA
cttcttcttgggcaataaag

SEQ ID NO: 1571 - RNA, 20 nt, synthetic construct
  source 1..20: mol_type = other RNA
tcttcttgggcaataaagta

SEQ ID NO: 1572 - RNA, 20 nt, synthetic construct
  source 1..20: mol_type = other RNA
cttcttgggcaataaagtac

SEQ ID NO: 1573 - RNA, 20 nt, synthetic construct
  source 1..20: mol_type = other RNA
tttcccagtttttcactaga

SEQ ID NO: 1574 - RNA, 20 nt, synthetic construct
  source 1..20: mol_type = other RNA
cagtttttcactagagaaga

SEQ ID NO: 1575 - RNA, 20 nt, synthetic construct
  source 1..20: mol_type = other RNA
gtttttcactagagaagagt

SEQ ID NO: 1576 - RNA, 20 nt, synthetic construct
  source 1..20: mol_type = other RNA
ttcactagagaagagtctgt

SEQ ID NO: 1577 - RNA, 20 nt, synthetic construct
  source 1..20: mol_type = other RNA
cgcgcatgttgttcggcgct

SEQ ID NO: 1578 - RNA, 20 nt, synthetic construct
  source 1..20: mol_type = other RNA
gccctaaagtcaagtccacg

SEQ ID NO: 1579 - RNA, 20 nt, synthetic construct
  source 1..20: mol_type = other RNA
atcaccaagctcagtctacg

SEQ ID NO: 1580 - RNA, 20 nt, synthetic construct
  source 1..20: mol_type = other RNA
gtcggcgtcctctccggtat

SEQ ID NO: 1581 - RNA, 20 nt, synthetic construct
  source 1..20: mol_type = other RNA
gcgtcctctccggtatcccg

SEQ ID NO: 1582 - RNA, 20 nt, synthetic construct
  source 1..20: mol_type = other RNA
tcctctcagatcttgtgcgg

SEQ ID NO: 1583 - RNA, 20 nt, synthetic construct
  source 1..20: mol_type = other RNA
cctctcagatcttgtgcgga

SEQ ID NO: 1584 - RNA, 20 nt, synthetic construct
  source 1..20: mol_type = other RNA
cttccatccatccttcaact

SEQ ID NO: 1585 - RNA, 20 nt, synthetic construct
  source 1..20: mol_type = other RNA
ccatccatccttcaacttaa

SEQ ID NO: 1586 - RNA, 20 nt, synthetic construct
  source 1..20: mol_type = other RNA
ccatccttcaacttaagcaa

SEQ ID NO: 1587 - RNA, 20 nt, synthetic construct
  source 1..20: mol_type = other RNA
catccttcaacttaagcaag

SEQ ID NO: 1588 - RNA, 20 nt, synthetic construct
  source 1..20: mol_type = other RNA
acttaagcaagttcctccga

SEQ ID NO: 1589 - RNA, 20 nt, synthetic construct
  source 1..20: mol_type = other RNA
atgcccgacgatgtcctgtg

SEQ ID NO: 1590 - RNA, 20 nt, synthetic construct
  source 1..20: mol_type = other RNA
tgcccgacgatgtcctgtgg

SEQ ID NO: 1591 - RNA, 20 nt, synthetic construct
  source 1..20: mol_type = other RNA
ccgacgatgtcctgtggttg

SEQ ID NO: 1592 - RNA, 20 nt, synthetic construct
  source 1..20: mol_type = other RNA
gacgatgtcctgtggttgca

SEQ ID NO: 1593 - RNA, 20 nt, synthetic construct
  source 1..20: mol_type = other RNA
tgtggttgcagtgggtgacc

SEQ ID NO: 1594 - RNA, 20 nt, synthetic construct
  source 1..20: mol_type = other RNA
gggtgacctcacaggtgttc

SEQ ID NO: 1595 - RNA, 20 nt, synthetic construct
  source 1..20: mol_type = other RNA
gtgacctcacaggtgttcac

SEQ ID NO: 1596 - RNA, 20 nt, synthetic construct
  source 1..20: mol_type = other RNA
tgacctcacaggtgttcact

SEQ ID NO: 1597 - RNA, 20 nt, synthetic construct
  source 1..20: mol_type = other RNA
acctcacaggtgttcactcg

SEQ ID NO: 1598 - RNA, 20 nt, synthetic construct
  source 1..20: mol_type = other RNA
ctcacaggtgttcactcgag

SEQ ID NO: 1599 - RNA, 20 nt, synthetic construct
  source 1..20: mol_type = other RNA
tcacaggtgttcactcgagt

SEQ ID NO: 1600 - RNA, 20 nt, synthetic construct
  source 1..20: mol_type = other RNA
cacaggtgttcactcgagtg

SEQ ID NO: 1601 - RNA, 20 nt, synthetic construct
  source 1..20: mol_type = other RNA
acaggtgttcactcgagtgc

SEQ ID NO: 1602 - RNA, 20 nt, synthetic construct
  source 1..20: mol_type = other RNA
caggtgttcactcgagtgct

SEQ ID NO: 1603 - RNA, 20 nt, synthetic construct
  source 1..20: mol_type = other RNA
ttcactcgagtgctgatgtg

SEQ ID NO: 1604 - RNA, 20 nt, synthetic construct
  source 1..20: mol_type = other RNA
aaatgccagtgagcagccaa

SEQ ID NO: 1605 - RNA, 20 nt, synthetic construct
  source 1..20: mol_type = other RNA
acaggcctccccatgcacac

SEQ ID NO: 1606 - RNA, 20 nt, synthetic construct
  source 1..20: mol_type = other RNA
catgcacacctgagcaggac

SEQ ID NO: 1607 - RNA, 20 nt, synthetic construct
  source 1..20: mol_type = other RNA
acacctgagcaggactggcc

SEQ ID NO: 1608 - RNA, 20 nt, synthetic construct
  source 1..20: mol_type = other RNA
gctgtccagcagagaccaaa

SEQ ID NO: 1609 - RNA, 20 nt, synthetic construct
  source 1..20: mol_type = other RNA
gtccagcagagaccaaagca

SEQ ID NO: 1610 - RNA, 20 nt, synthetic construct
  source 1..20: mol_type = other RNA
gaggccaccccgcggtccat

SEQ ID NO: 1611 - RNA, 20 nt, synthetic construct
  source 1..20: mol_type = other RNA
cccagccaggcctgaagtca

SEQ ID NO: 1612 - RNA, 20 nt, synthetic construct
  source 1..20: mol_type = other RNA
ccagccaggcctgaagtcat

SEQ ID NO: 1613 - RNA, 20 nt, synthetic construct
  source 1..20: mol_type = other RNA
agaagggatggatcctgagg

SEQ ID NO: 1614 - RNA, 20 nt, synthetic construct
  source 1..20: mol_type = other RNA
agggatggatcctgaggtcg

SEQ ID NO: 1615 - RNA, 20 nt, synthetic construct
  source 1..20: mol_type = other RNA
tcctgaggtcgccatgccca

SEQ ID NO: 1616 - RNA, 20 nt, synthetic construct
  source 1..20: mol_type = other RNA
gtcgccatgcccagctgggc

SEQ ID NO: 1617 - RNA, 20 nt, synthetic construct
  source 1..20: mol_type = other RNA
ccagctgggcaaacatgagt

SEQ ID NO: 1618 - RNA, 20 nt, synthetic construct
  source 1..20: mol_type = other RNA
cagctgggcaaacatgagtc

SEQ ID NO: 1619 - RNA, 20 nt, synthetic construct
  source 1..20: mol_type = other RNA
agctgggcaaacatgagtct

SEQ ID NO: 1620 - RNA, 20 nt, synthetic construct
  source 1..20: mol_type = other RNA
ctgggcaaacatgagtctgg

SEQ ID NO: 1621 - RNA, 20 nt, synthetic construct
  source 1..20: mol_type = other RNA
ggcaaacatgagtctggatt

SEQ ID NO: 1622 - RNA, 20 nt, synthetic construct
  source 1..20: mol_type = other RNA
gcaaacatgagtctggattc

SEQ ID NO: 1623 - RNA, 20 nt, synthetic construct
  source 1..20: mol_type = other RNA
caaacatgagtctggattct

SEQ ID NO: 1624 - RNA, 20 nt, synthetic construct
  source 1..20: mol_type = other RNA
ggattcttccccggagtcgg

SEQ ID NO: 1625 - RNA, 20 nt, synthetic construct
  source 1..20: mol_type = other RNA
cccggagtcggctgccttgg

SEQ ID NO: 1626 - RNA, 20 nt, synthetic construct
  source 1..20: mol_type = other RNA
accctctcgcccaggctcgc

SEQ ID NO: 1627 - RNA, 20 nt, synthetic construct
  source 1..20: mol_type = other RNA
ccctctcgcccaggctcgct

SEQ ID NO: 1628 - RNA, 20 nt, synthetic construct
  source 1..20: mol_type = other RNA
tctcgcccaggctcgctaca

SEQ ID NO: 1629 - RNA, 20 nt, synthetic construct
  source 1..20: mol_type = other RNA
tacagcactgagtgaagaaa

SEQ ID NO: 1630 - RNA, 20 nt, synthetic construct
  source 1..20: mol_type = other RNA
ccattaggataatgtcttat

SEQ ID NO: 1631 - RNA, 20 nt, synthetic construct
  source 1..20: mol_type = other RNA
cattaggataatgtcttatg

SEQ ID NO: 1632 - RNA, 20 nt, synthetic construct
  source 1..20: mol_type = other RNA
ggagtgagtgacaacgtacc

SEQ ID NO: 1633 - RNA, 20 nt, synthetic construct
  source 1..20: mol_type = other RNA
gagtgagtgacaacgtaccc

SEQ ID NO: 1634 - RNA, 20 nt, synthetic construct
  source 1..20: mol_type = other RNA
ttcttgggcaataaagtacc

SEQ ID NO: 1635 - RNA, 20 nt, synthetic construct
  source 1..20: mol_type = other RNA
atgcctcccggccaatgtcc

SEQ ID NO: 1636 - RNA, 20 nt, synthetic construct
  source 1..20: mol_type = other RNA
tcagtctacgcctctgcaca

SEQ ID NO: 1637 - RNA, 20 nt, synthetic construct
  source 1..20: mol_type = other RNA
cttaagcaagttcctccgac

SEQ ID NO: 1638 - RNA, 20 nt, synthetic construct
  source 1..20: mol_type = other RNA
aaatgcctcccggccaatgt

SEQ ID NO: 1639 - RNA, 20 nt, synthetic construct
  source 1..20: mol_type = other RNA
aatgcctcccggccaatgtc

SEQ ID NO: 1640 - RNA, 20 nt, synthetic construct
  source 1..20: mol_type = other RNA
cttgggcaataaagtacctg

SEQ ID NO: 1641 - RNA, 20 nt, synthetic construct
  source 1..20: mol_type = other RNA
gcgcttcggccggggcgttg

SEQ ID NO: 1642 - RNA, 20 nt, synthetic construct
  source 1..20: mol_type = other RNA
gtctggattcttccccggag

SEQ ID NO: 1643 - RNA, 20 nt, synthetic construct
  source 1..20: mol_type = other RNA
ttaccagagtgtctgatggg

SEQ ID NO: 1644 - RNA, 20 nt, synthetic construct
  source 1..20: mol_type = other RNA
ggttgcagtgggtgacctca

SEQ ID NO: 1645 - RNA, 20 nt, synthetic construct
  source 1..20: mol_type = other RNA
cgttctggtgtctgactttc

SEQ ID NO: 1646 - RNA, 20 nt, synthetic construct
  source 1..20: mol_type = other RNA
ggagggagatgagctgctag

SEQ ID NO: 1647 - RNA, 20 nt, synthetic construct
  source 1..20: mol_type = other RNA
cgaactttcttcatgtggac

SEQ ID NO: 1648 - RNA, 20 nt, synthetic construct
  source 1..20: mol_type = other RNA
cccaaatgccagtgagcagc

SEQ ID NO: 1649 - RNA, 20 nt, synthetic construct
  source 1..20: mol_type = other RNA
gggaacctctaccttctctc

SEQ ID NO: 1650 - RNA, 20 nt, synthetic construct
  source 1..20: mol_type = other RNA
cacgaactttcttcatgtgg

SEQ ID NO: 1651 - RNA, 20 nt, synthetic construct
  source 1..20: mol_type = other RNA
gaaatgaaagacaaaggtgg

SEQ ID NO: 1652 - RNA, 20 nt, synthetic construct
  source 1..20: mol_type = other RNA
ccctgtaccctgcctgtgga

SEQ ID NO: 1653 - RNA, 20 nt, synthetic construct
  source 1..20: mol_type = other RNA
aaatgaaagacaaaggtgga

SEQ ID NO: 1654 - RNA, 20 nt, synthetic construct
  source 1..20: mol_type = other RNA
cgagtgctgatgtgtctgct

SEQ ID NO: 1655 - RNA, 20 nt, synthetic construct
  source 1..20: mol_type = other RNA
atgtacgacgcagagcgcgg

SEQ ID NO: 1656 - RNA, 20 nt, synthetic construct
  source 1..20: mol_type = other RNA
atccttcaacttaagcaagt

SEQ ID NO: 1657 - RNA, 20 nt, synthetic construct
  source 1..20: mol_type = other RNA
tccttcaacttaagcaagtt

SEQ ID NO: 1658 - RNA, 20 nt, synthetic construct
  source 1..20: mol_type = other RNA
gcaaatgcctcccggccaat

SEQ ID NO: 1659 - RNA, 20 nt, synthetic construct
  source 1..20: mol_type = other RNA
cgacgatgtcctgtggttgc

SEQ ID NO: 1660 - RNA, 20 nt, synthetic construct
  source 1..20: mol_type = other RNA
atgttgttcggcgcttcggc

SEQ ID NO: 1661 - RNA, 20 nt, synthetic construct
  source 1..20: mol_type = other RNA
tgttcggcgcttcggccggg

SEQ ID NO: 1662 - RNA, 20 nt, synthetic construct
  source 1..20: mol_type = other RNA
cgaagtcgtggatgccttgg

SEQ ID NO: 1663 - RNA, 20 nt, synthetic construct
  source 1..20: mol_type = other RNA
gtcaagtccacgaactttct

SEQ ID NO: 1664 - RNA, 20 nt, synthetic construct
  source 1..20: mol_type = other RNA
tcaagtccacgaactttctt

SEQ ID NO: 1665 - RNA, 20 nt, synthetic construct
  source 1..20: mol_type = other RNA
ggaacctctaccttctctcg

SEQ ID NO: 1666 - RNA, 20 nt, synthetic construct
  source 1..20: mol_type = other RNA
ctctcgagagcttttgtccc

SEQ ID NO: 1667 - RNA, 20 nt, synthetic construct
  source 1..20: mol_type = other RNA
tcggcgtcctctccggtatc

SEQ ID NO: 1668 - RNA, 20 nt, synthetic construct
  source 1..20: mol_type = other RNA
cggcgtcctctccggtatcc

SEQ ID NO: 1669 - RNA, 20 nt, synthetic construct
  source 1..20: mol_type = other RNA
ctccggtatcccgctggagc

SEQ ID NO: 1670 - RNA, 20 nt, synthetic construct
  source 1..20: mol_type = other RNA
cagatcttgtgcggaaggcc

SEQ ID NO: 1671 - RNA, 20 nt, synthetic construct
  source 1..20: mol_type = other RNA
tccatccttcaacttaagca

SEQ ID NO: 1672 - RNA, 20 nt, synthetic construct
  source 1..20: mol_type = other RNA
tccagcagagaccaaagcag

SEQ ID NO: 1673 - RNA, 20 nt, synthetic construct
  source 1..20: mol_type = other RNA
ctcagaagggatggatcctg

SEQ ID NO: 1674 - RNA, 20 nt, synthetic construct
  source 1..20: mol_type = other RNA
tgaggtcgccatgcccagct

SEQ ID NO: 1675 - RNA, 20 nt, synthetic construct
  source 1..20: mol_type = other RNA
gccatgcccagctgggcaaa

SEQ ID NO: 1676 - RNA, 20 nt, synthetic construct
  source 1..20: mol_type = other RNA
attaggataatgtcttatgt

SEQ ID NO: 1677 - RNA, 20 nt, synthetic construct
  source 1..20: mol_type = other RNA
ggataatgtcttatgtaatg

SEQ ID NO: 1678 - RNA, 20 nt, synthetic construct
  source 1..20: mol_type = other RNA
cttatgtaatgctgccctgt

SEQ ID NO: 1679 - RNA, 20 nt, synthetic construct
  source 1..20: mol_type = other RNA
ctgtaccctgcctgtggaat

SEQ ID NO: 1680 - RNA, 20 nt, synthetic construct
  source 1..20: mol_type = other RNA
gtggaatctgccattgcgat

SEQ ID NO: 1681 - RNA, 20 nt, synthetic construct
  source 1..20: mol_type = other RNA
agggctgtccagcagagacc

SEQ ID NO: 1682 - RNA, 20 nt, synthetic construct
  source 1..20: mol_type = other RNA
gcctccccatgcacacctga

SEQ ID NO: 1683 - RNA, 20 nt, synthetic construct
  source 1..20: mol_type = other RNA
tctggattcttccccggagt

SEQ ID NO: 1684 - RNA, 20 nt, synthetic construct
  source 1..20: mol_type = other RNA
ggtgacctcacaggtgttca

SEQ ID NO: 1685 - RNA, 20 nt, synthetic construct
  source 1..20: mol_type = other RNA
gtgggtgacctcacaggtgt

SEQ ID NO: 1686 - RNA, 20 nt, synthetic construct
  source 1..20: mol_type = other RNA
catccatccttcaacttaag

SEQ ID NO: 1687 - RNA, 20 nt, synthetic construct
  source 1..20: mol_type = other RNA
gtcctctcagatcttgtgcg

SEQ ID NO: 1688 - RNA, 20 nt, synthetic construct
  source 1..20: mol_type = other RNA
cgtcctctccggtatcccgc

SEQ ID NO: 1689 - RNA, 20 nt, synthetic construct
  source 1..20: mol_type = other RNA
ggcgtcctctccggtatccc

SEQ ID NO: 1690 - RNA, 20 nt, synthetic construct
  source 1..20: mol_type = other RNA
cgtcggcgtcctctccggta

SEQ ID NO: 1691 - RNA, 20 nt, synthetic construct
  source 1..20: mol_type = other RNA
gtggatgccttggtatgttc

SEQ ID NO: 1692 - RNA, 20 nt, synthetic construct
  source 1..20: mol_type = other RNA
tcgtggatgccttggtatgt

SEQ ID NO: 1693 - RNA, 20 nt, synthetic construct
  source 1..20: mol_type = other RNA
gcgtcggcgtcctctccggt

SEQ ID NO: 1694 - RNA, 20 nt, synthetic construct
  source 1..20: mol_type = other RNA
tgttgttcggcgcttcggcc

SEQ ID NO: 1695 - RNA, 20 nt, synthetic construct
  source 1..20: mol_type = other RNA
aagttcctccgacagggtct

SEQ ID NO: 1696 - RNA, 20 nt, synthetic construct
  source 1..20: mol_type = other RNA
gcatgttgttcggcgcttcg

SEQ ID NO: 1697 - RNA, 20 nt, synthetic construct
  source 1..20: mol_type = other RNA
aacttaagcaagttcctccg

SEQ ID NO: 1698 - RNA, 20 nt, synthetic construct
  source 1..20: mol_type = other RNA
tacgacgcagagcgcggctg

SEQ ID NO: 1699-2328 - skipped (630 entries)

SEQ ID NO: 2329 - RNA, 23 nt, synthetic construct
  source 1..23: mol_type = other RNA
aggtcctgatccgcagcagcttt

SEQ ID NO: 2330 - RNA, 23 nt, synthetic construct
  source 1..23: mol_type = other RNA
tcgggtcctgatccgcagcagtt

SEQ ID NO: 2331 - RNA, 23 nt, synthetic construct
  source 1..23: mol_type = other RNA
atcggctcgggtcctgatccgtt

SEQ ID NO: 2332 - RNA, 23 nt, synthetic construct
  source 1..23: mol_type = other RNA
aatcggctcgggtcctgatcctt

SEQ ID NO: 2333 - RNA, 23 nt, synthetic construct
  source 1..23: mol_type = other RNA
acaagctccagccgcgctctgtt

SEQ ID NO: 2334 - RNA, 23 nt, synthetic construct
  source 1..23: mol_type = other RNA
aacaagctccagccgcgctcttt

SEQ ID NO: 2335 - RNA, 23 nt, synthetic construct
  source 1..23: mol_type = other RNA
agacaagctccagccgcgctctt

SEQ ID NO: 2336 - RNA, 23 nt, synthetic construct
  source 1..23: mol_type = other RNA
aggacaagctccagccgcgcttt

SEQ ID NO: 2337 - RNA, 23 nt, synthetic construct
  source 1..23: mol_type = other RNA
acgaaggacaagctccagccgtt

SEQ ID NO: 2338 - RNA, 23 nt, synthetic construct
  source 1..23: mol_type = other RNA
agcgaaggacaagctccagcctt

SEQ ID NO: 2339 - RNA, 23 nt, synthetic construct
  source 1..23: mol_type = other RNA
acgcgaaggacaagctccagctt

SEQ ID NO: 2340 - RNA, 23 nt, synthetic construct
  source 1..23: mol_type = other RNA
agcagcccgcgaaggacaagctt

SEQ ID NO: 2341 - RNA, 23 nt, synthetic construct
  source 1..23: mol_type = other RNA
acgcagcccgcgaaggacaagtt

SEQ ID NO: 2342 - RNA, 23 nt, synthetic construct
  source 1..23: mol_type = other RNA
agacgtggtagaagcccaggatt

SEQ ID NO: 2343 - RNA, 23 nt, synthetic construct
  source 1..23: mol_type = other RNA
acgacgtggtagaagcccaggtt

SEQ ID NO: 2344 - RNA, 23 nt, synthetic construct
  source 1..23: mol_type = other RNA
accgacgtggtagaagcccagtt

SEQ ID NO: 2345 - RNA, 23 nt, synthetic construct
  source 1..23: mol_type = other RNA
acccgacgtggtagaagcccatt

SEQ ID NO: 2346 - RNA, 23 nt, synthetic construct
  source 1..23: mol_type = other RNA
agccccgacgtggtagaagcctt

SEQ ID NO: 2347 - RNA, 23 nt, synthetic construct
  source 1..23: mol_type = other RNA
tcgccccgacgtggtagaagctt

SEQ ID NO: 2348 - RNA, 23 nt, synthetic construct
  source 1..23: mol_type = other RNA
agtcgccccgacgtggtagaatt

SEQ ID NO: 2349 - RNA, 23 nt, synthetic construct
  source 1..23: mol_type = other RNA
aggtcgccccgacgtggtagatt

SEQ ID NO: 2350 - RNA, 23 nt, synthetic construct
  source 1..23: mol_type = other RNA
agggtcgccccgacgtggtagtt

SEQ ID NO: 2351 - RNA, 23 nt, synthetic construct
  source 1..23: mol_type = other RNA
acgggtcgccccgacgtggtatt

SEQ ID NO: 2352 - RNA, 23 nt, synthetic construct
  source 1..23: mol_type = other RNA
agcgtgctcgctcaggcagcgtt

SEQ ID NO: 2353 - RNA, 23 nt, synthetic construct
  source 1..23: mol_type = other RNA
aaggtgcggggcgtgctcgcttt

SEQ ID NO: 2354 - RNA, 23 nt, synthetic construct
  source 1..23: mol_type = other RNA
agtcgcggaggaggtgcggggtt

SEQ ID NO: 2355 - RNA, 23 nt, synthetic construct
  source 1..23: mol_type = other RNA
agcgtcgcggaggaggtgcggtt

SEQ ID NO: 2356 - RNA, 23 nt, synthetic construct
  source 1..23: mol_type = other RNA
acgcgtcgcggaggaggtgcgtt

SEQ ID NO: 2357 - RNA, 23 nt, synthetic construct
  source 1..23: mol_type = other RNA
aaacatgcgcgcgtcgcggagtt

SEQ ID NO: 2358 - RNA, 23 nt, synthetic construct
  source 1..23: mol_type = other RNA
acaacatgcgcgcgtcgcggatt

SEQ ID NO: 2359 - RNA, 23 nt, synthetic construct
  source 1..23: mol_type = other RNA
aaacaacatgcgcgcgtcgcgtt

SEQ ID NO: 2360 - RNA, 23 nt, synthetic construct
  source 1..23: mol_type = other RNA
agaacaacatgcgcgcgtcgctt

SEQ ID NO: 2361 - RNA, 23 nt, synthetic construct
  source 1..23: mol_type = other RNA
acgaacaacatgcgcgcgtcgtt

SEQ ID NO: 2362 - RNA, 23 nt, synthetic construct
  source 1..23: mol_type = other RNA
agccgaacaacatgcgcgcgttt

SEQ ID NO: 2363 - RNA, 23 nt, synthetic construct
  source 1..23: mol_type = other RNA
atgcaacgccccggccgaagctt

SEQ ID NO: 2364 - RNA, 23 nt, synthetic construct
  source 1..23: mol_type = other RNA
acgcagtgcaacgccccggcctt

SEQ ID NO: 2365 - RNA, 23 nt, synthetic construct
  source 1..23: mol_type = other RNA
aacgcagtgcaacgccccggctt

SEQ ID NO: 2366 - RNA, 23 nt, synthetic construct
  source 1..23: mol_type = other RNA
agacgcagtgcaacgccccggtt

SEQ ID NO: 2367 - RNA, 23 nt, synthetic construct
  source 1..23: mol_type = other RNA
acgacgcagtgcaacgccccgtt

SEQ ID NO: 2368 - RNA, 23 nt, synthetic construct
  source 1..23: mol_type = other RNA
accgacgcagtgcaacgcccctt

SEQ ID NO: 2369 - RNA, 23 nt, synthetic construct
  source 1..23: mol_type = other RNA
agccgacgcagtgcaacgccctt

SEQ ID NO: 2370 - RNA, 23 nt, synthetic construct
  source 1..23: mol_type = other RNA
acgccgacgcagtgcaacgcctt

SEQ ID NO: 2371 - RNA, 23 nt, synthetic construct
  source 1..23: mol_type = other RNA
aacgccgacgcagtgcaacgctt

SEQ ID NO: 2372 - RNA, 23 nt, synthetic construct
  source 1..23: mol_type = other RNA
aggacgccgacgcagtgcaactt

SEQ ID NO: 2373 - RNA, 23 nt, synthetic construct
  source 1..23: mol_type = other RNA
aaggacgccgacgcagtgcaatt

SEQ ID NO: 2374 - RNA, 23 nt, synthetic construct
  source 1..23: mol_type = other RNA
agagaggacgccgacgcagtgtt

SEQ ID NO: 2375 - RNA, 23 nt, synthetic construct
  source 1..23: mol_type = other RNA
aagtctgctccagcgggatactt

SEQ ID NO: 2376 - RNA, 23 nt, synthetic construct
  source 1..23: mol_type = other RNA
acaagatctgagaggacctgctt

SEQ ID NO: 2377 - RNA, 23 nt, synthetic construct
  source 1..23: mol_type = other RNA
aacaagatctgagaggacctgtt

SEQ ID NO: 2378 - RNA, 23 nt, synthetic construct
  source 1..23: mol_type = other RNA
tccgactcctggccttccgcatt

SEQ ID NO: 2379 - RNA, 23 nt, synthetic construct
  source 1..23: mol_type = other RNA
ttccgactcctggccttccgctt

SEQ ID NO: 2380 - RNA, 23 nt, synthetic construct
  source 1..23: mol_type = other RNA
attccgactcctggccttccgtt

SEQ ID NO: 2381 - RNA, 23 nt, synthetic construct
  source 1..23: mol_type = other RNA
tgttccgactcctggccttcctt

SEQ ID NO: 2382 - RNA, 23 nt, synthetic construct
  source 1..23: mol_type = other RNA
atgttccgactcctggccttctt

SEQ ID NO: 2383 - RNA, 23 nt, synthetic construct
  source 1..23: mol_type = other RNA
aatgttccgactcctggcctttt

SEQ ID NO: 2384 - RNA, 23 nt, synthetic construct
  source 1..23: mol_type = other RNA
accaatgttccgactcctggctt

SEQ ID NO: 2385 - RNA, 23 nt, synthetic construct
  source 1..23: mol_type = other RNA
atggtggacattggccgggagtt

SEQ ID NO: 2386 - RNA, 23 nt, synthetic construct
  source 1..23: mol_type = other RNA
aaacgttttccccatcagacatt

SEQ ID NO: 2387 - RNA, 23 nt, synthetic construct
  source 1..23: mol_type = other RNA
agaacgttttccccatcagactt

SEQ ID NO: 2388 - RNA, 23 nt, synthetic construct
  source 1..23: mol_type = other RNA
aagaacgttttccccatcagatt

SEQ ID NO: 2389 - RNA, 23 nt, synthetic construct
  source 1..23: mol_type = other RNA
aaccagaacgttttccccatctt

SEQ ID NO: 2390 - RNA, 23 nt, synthetic construct
  source 1..23: mol_type = other RNA
aacaccagaacgttttccccatt

SEQ ID NO: 2391 - RNA, 23 nt, synthetic construct
  source 1..23: mol_type = other RNA
agacaccagaacgttttcccctt

SEQ ID NO: 2392 - RNA, 23 nt, synthetic construct
  source 1..23: mol_type = other RNA
aagacaccagaacgttttccctt

SEQ ID NO: 2393 - RNA, 23 nt, synthetic construct
  source 1..23: mol_type = other RNA
agtcagacaccagaacgtttttt

SEQ ID NO: 2394 - RNA, 23 nt, synthetic construct
  source 1..23: mol_type = other RNA
aagtcagacaccagaacgttttt

SEQ ID NO: 2395 - RNA, 23 nt, synthetic construct
  source 1..23: mol_type = other RNA
aacgacttcgtctttggaccgtt

SEQ ID NO: 2396 - RNA, 23 nt, synthetic construct
  source 1..23: mol_type = other RNA
acacgacttcgtctttggacctt

SEQ ID NO: 2397 - RNA, 23 nt, synthetic construct
  source 1..23: mol_type = other RNA
atccacgacttcgtctttggatt

SEQ ID NO: 2398 - RNA, 23 nt, synthetic construct
  source 1..23: mol_type = other RNA
acatccacgacttcgtctttgtt

SEQ ID NO: 2399 - RNA, 23 nt, synthetic construct
  source 1..23: mol_type = other RNA
agggataaggccactgtagaatt

SEQ ID NO: 2400 - RNA, 23 nt, synthetic construct
  source 1..23: mol_type = other RNA
acacgcctctgaaggaaggagtt

SEQ ID NO: 2401 - RNA, 23 nt, synthetic construct
  source 1..23: mol_type = other RNA
agcacgcctctgaaggaaggatt

SEQ ID NO: 2402 - RNA, 23 nt, synthetic construct
  source 1..23: mol_type = other RNA
tcgcacgcctctgaaggaaggtt

SEQ ID NO: 2403 - RNA, 23 nt, synthetic construct
  source 1..23: mol_type = other RNA
atcgcacgcctctgaaggaagtt

SEQ ID NO: 2404 - RNA, 23 nt, synthetic construct
  source 1..23: mol_type = other RNA
tatcgcacgcctctgaaggaatt

SEQ ID NO: 2405 - RNA, 23 nt, synthetic construct
  source 1..23: mol_type = other RNA
atatcgcacgcctctgaaggatt

SEQ ID NO: 2406 - RNA, 23 nt, synthetic construct
  source 1..23: mol_type = other RNA
aatatcgcacgcctctgaaggtt

SEQ ID NO: 2407 - RNA, 23 nt, synthetic construct
  source 1..23: mol_type = other RNA
acatatcgcacgcctctgaagtt

SEQ ID NO: 2408 - RNA, 23 nt, synthetic construct
  source 1..23: mol_type = other RNA
acacatatcgcacgcctctgatt

SEQ ID NO: 2409 - RNA, 23 nt, synthetic construct
  source 1..23: mol_type = other RNA
atccacatatcgcacgcctcttt

SEQ ID NO: 2410 - RNA, 23 nt, synthetic construct
  source 1..23: mol_type = other RNA
acatccacatatcgcacgccttt

SEQ ID NO: 2411 - RNA, 23 nt, synthetic construct
  source 1..23: mol_type = other RNA
atccatccacatatcgcacgctt

SEQ ID NO: 2412 - RNA, 23 nt, synthetic construct
  source 1..23: mol_type = other RNA
actcctccatccacatatcgctt

SEQ ID NO: 2413 - RNA, 23 nt, synthetic construct
  source 1..23: mol_type = other RNA
aaagggtacgttgtcactcactt

SEQ ID NO: 2414 - RNA, 23 nt, synthetic construct
  source 1..23: mol_type = other RNA
aatgaagggtacgttgtcacttt

SEQ ID NO: 2415 - RNA, 23 nt, synthetic construct
  source 1..23: mol_type = other RNA
aaatgaagggtacgttgtcactt

SEQ ID NO: 2416 - RNA, 23 nt, synthetic construct
  source 1..23: mol_type = other RNA
tcaatgaagggtacgttgtcatt

SEQ ID NO: 2417 - RNA, 23 nt, synthetic construct
  source 1..23: mol_type = other RNA
atcaatgaagggtacgttgtctt

SEQ ID NO: 2418 - RNA, 23 nt, synthetic construct
  source 1..23: mol_type = other RNA
aatcaatgaagggtacgttgttt

SEQ ID NO: 2419 - RNA, 23 nt, synthetic construct
  source 1..23: mol_type = other RNA
acatcaatgaagggtacgttgtt

SEQ ID NO: 2420 - RNA, 23 nt, synthetic construct
  source 1..23: mol_type = other RNA
tggcatcaatgaagggtacgttt

SEQ ID NO: 2421 - RNA, 23 nt, synthetic construct
  source 1..23: mol_type = other RNA
agcagatgtcgtactccccattt

SEQ ID NO: 2422 - RNA, 23 nt, synthetic construct
  source 1..23: mol_type = other RNA
aggcagatgtcgtactccccatt

SEQ ID NO: 2423 - RNA, 23 nt, synthetic construct
  source 1..23: mol_type = other RNA
atttagggcagatgtcgtacttt

SEQ ID NO: 2424 - RNA, 23 nt, synthetic construct
  source 1..23: mol_type = other RNA
aactttagggcagatgtcgtatt

SEQ ID NO: 2425 - RNA, 23 nt, synthetic construct
  source 1..23: mol_type = other RNA
tgactttagggcagatgtcgttt

SEQ ID NO: 2426 - RNA, 23 nt, synthetic construct
  source 1..23: mol_type = other RNA
ttgactttagggcagatgtcgtt

SEQ ID NO: 2427 - RNA, 23 nt, synthetic construct
  source 1..23: mol_type = other RNA
attgactttagggcagatgtctt

SEQ ID NO: 2428 - RNA, 23 nt, synthetic construct
  source 1..23: mol_type = other RNA
acttgactttagggcagatgttt

SEQ ID NO: 2429 - RNA, 23 nt, synthetic construct
  source 1..23: mol_type = other RNA
aacttgactttagggcagatgtt

SEQ ID NO: 2430 - RNA, 23 nt, synthetic construct
  source 1..23: mol_type = other RNA
agacttgactttagggcagattt

SEQ ID NO: 2431 - RNA, 23 nt, synthetic construct
  source 1..23: mol_type = other RNA
atgagcttggtgatgtccacatt

SEQ ID NO: 2432 - RNA, 23 nt, synthetic construct
  source 1..23: mol_type = other RNA
tagaggttccctgtgcagaggtt

SEQ ID NO: 2433 - RNA, 23 nt, synthetic construct
  source 1..23: mol_type = other RNA
aagatccggggggacaaaagctt

SEQ ID NO: 2434 - RNA, 23 nt, synthetic construct
  source 1..23: mol_type = other RNA
tgagatccggggggacaaaagtt

SEQ ID NO: 2435 - RNA, 23 nt, synthetic construct
  source 1..23: mol_type = other RNA
ttgagatccggggggacaaaatt

SEQ ID NO: 2436 - RNA, 23 nt, synthetic construct
  source 1..23: mol_type = other RNA
attgagatccggggggacaaatt

SEQ ID NO: 2437 - RNA, 23 nt, synthetic construct
  source 1..23: mol_type = other RNA
acttgagatccggggggacaatt

SEQ ID NO: 2438 - RNA, 23 nt, synthetic construct
  source 1..23: mol_type = other RNA
tcccagcaccttgagatccggtt

SEQ ID NO: 2439 - RNA, 23 nt, synthetic construct
  source 1..23: mol_type = other RNA
aatatctctcccagcaccttgtt

SEQ ID NO: 2440 - RNA, 23 nt, synthetic construct
  source 1..23: mol_type = other RNA
acatatctctcccagcacctttt

SEQ ID NO: 2441 - RNA, 23 nt, synthetic construct
  source 1..23: mol_type = other RNA
aggcatatctctcccagcacctt

SEQ ID NO: 2442 - RNA, 23 nt, synthetic construct
  source 1..23: mol_type = other RNA
tcgaaggcatatctctcccagtt

SEQ ID NO: 2443 - RNA, 23 nt, synthetic construct
  source 1..23: mol_type = other RNA
atcgaaggcatatctctcccatt

SEQ ID NO: 2444 - RNA, 23 nt, synthetic construct
  source 1..23: mol_type = other RNA
actcgaaggcatatctctccctt

SEQ ID NO: 2445 - RNA, 23 nt, synthetic construct
  source 1..23: mol_type = other RNA
tcctcgaaggcatatctctcctt

SEQ ID NO: 2446 - RNA, 23 nt, synthetic construct
  source 1..23: mol_type = other RNA
tatcctcgaaggcatatctcttt

SEQ ID NO: 2447 - RNA, 23 nt, synthetic construct
  source 1..23: mol_type = other RNA
atatcctcgaaggcatatctctt

SEQ ID NO: 2448 - RNA, 23 nt, synthetic construct
  source 1..23: mol_type = other RNA
aaaatatcctcgaaggcatattt

SEQ ID NO: 2449 - RNA, 23 nt, synthetic construct
  source 1..23: mol_type = other RNA
tccaaatatcctcgaaggcattt

SEQ ID NO: 2450 - RNA, 23 nt, synthetic construct
  source 1..23: mol_type = other RNA
atccaaatatcctcgaaggcatt

SEQ ID NO: 2451 - RNA, 23 nt, synthetic construct
  source 1..23: mol_type = other RNA
tgcagatgcccttctcttccatt

SEQ ID NO: 2452 - RNA, 23 nt, synthetic construct
  source 1..23: mol_type = other RNA
aagacgcaggtggtctagcagtt

SEQ ID NO: 2453 - RNA, 23 nt, synthetic construct
  source 1..23: mol_type = other RNA
agatgctgagacgcaggtggttt

SEQ ID NO: 2454 - RNA, 23 nt, synthetic construct
  source 1..23: mol_type = other RNA
acaggatgctgagacgcaggttt

SEQ ID NO: 2455 - RNA, 23 nt, synthetic construct
  source 1..23: mol_type = other RNA
aatgctctcatcccagggcagtt

SEQ ID NO: 2456 - RNA, 23 nt, synthetic construct
  source 1..23: mol_type = other RNA
acaggatgctctcatcccaggtt

SEQ ID NO: 2457 - RNA, 23 nt, synthetic construct
  source 1..23: mol_type = other RNA
aaatcttgctcatgtatccactt

SEQ ID NO: 2458 - RNA, 23 nt, synthetic construct
  source 1..23: mol_type = other RNA
aaaatcttgctcatgtatccatt

SEQ ID NO: 2459 - RNA, 23 nt, synthetic construct
  source 1..23: mol_type = other RNA
agtagcaagttgcaaatcttgtt

SEQ ID NO: 2460 - RNA, 23 nt, synthetic construct
  source 1..23: mol_type = other RNA
ataatgggtagcaagttgcaatt

SEQ ID NO: 2461 - RNA, 23 nt, synthetic construct
  source 1..23: mol_type = other RNA
actaatgggtagcaagttgcatt

SEQ ID NO: 2462 - RNA, 23 nt, synthetic construct
  source 1..23: mol_type = other RNA
tcctaatgggtagcaagttgctt

SEQ ID NO: 2463 - RNA, 23 nt, synthetic construct
  source 1..23: mol_type = other RNA
tatcctaatgggtagcaagtttt

SEQ ID NO: 2464 - RNA, 23 nt, synthetic construct
  source 1..23: mol_type = other RNA
ttatcctaatgggtagcaagttt

SEQ ID NO: 2465 - RNA, 23 nt, synthetic construct
  source 1..23: mol_type = other RNA
attatcctaatgggtagcaagtt

SEQ ID NO: 2466 - RNA, 23 nt, synthetic construct
  source 1..23: mol_type = other RNA
aattatcctaatgggtagcaatt

SEQ ID NO: 2467 - RNA, 23 nt, synthetic construct
  source 1..23: mol_type = other RNA
aacaatcgcaatggcagattctt

SEQ ID NO: 2468 - RNA, 23 nt, synthetic construct
  source 1..23: mol_type = other RNA
aagtctctggacaatcgcaattt

SEQ ID NO: 2469 - RNA, 23 nt, synthetic construct
  source 1..23: mol_type = other RNA
atgtcaccagtctctggacaatt

SEQ ID NO: 2470 - RNA, 23 nt, synthetic construct
  source 1..23: mol_type = other RNA
agccatgtcaccagtctctggtt

SEQ ID NO: 2471 - RNA, 23 nt, synthetic construct
  source 1..23: mol_type = other RNA
aatatctggaagccatgtcactt

SEQ ID NO: 2472 - RNA, 23 nt, synthetic construct
  source 1..23: mol_type = other RNA
acatatctggaagccatgtcatt

SEQ ID NO: 2473 - RNA, 23 nt, synthetic construct
  source 1..23: mol_type = other RNA
agcatatctggaagccatgtctt

SEQ ID NO: 2474 - RNA, 23 nt, synthetic construct
  source 1..23: mol_type = other RNA
agtcgggcatatctggaagcctt

SEQ ID NO: 2475 - RNA, 23 nt, synthetic construct
  source 1..23: mol_type = other RNA
tcgtcgggcatatctggaagctt

SEQ ID NO: 2476 - RNA, 23 nt, synthetic construct
  source 1..23: mol_type = other RNA
atcgtcgggcatatctggaagtt

SEQ ID NO: 2477 - RNA, 23 nt, synthetic construct
  source 1..23: mol_type = other RNA
aatcgtcgggcatatctggaatt

SEQ ID NO: 2478 - RNA, 23 nt, synthetic construct
  source 1..23: mol_type = other RNA
acatcgtcgggcatatctggatt

SEQ ID NO: 2479 - RNA, 23 nt, synthetic construct
  source 1..23: mol_type = other RNA
aacatcgtcgggcatatctggtt

SEQ ID NO: 2480 - RNA, 23 nt, synthetic construct
  source 1..23: mol_type = other RNA
aacctgtgaggtcacccactgtt

SEQ ID NO: 2481 - RNA, 23 nt, synthetic construct
  source 1..23: mol_type = other RNA
atttgggacctggaggcggggtt

SEQ ID NO: 2482 - RNA, 23 nt, synthetic construct
  source 1..23: mol_type = other RNA
agcatttgggacctggaggcgtt

SEQ ID NO: 2483 - RNA, 23 nt, synthetic construct
  source 1..23: mol_type = other RNA
tgcatggggaggcctgttggctt

SEQ ID NO: 2484 - RNA, 23 nt, synthetic construct
  source 1..23: mol_type = other RNA
aactgggaaaggtggagagcctt

SEQ ID NO: 2485 - RNA, 23 nt, synthetic construct
  source 1..23: mol_type = other RNA
atgaaaaactgggaaaggtggtt

SEQ ID NO: 2486 - RNA, 23 nt, synthetic construct
  source 1..23: mol_type = other RNA
agtgaaaaactgggaaaggtgtt

SEQ ID NO: 2487 - RNA, 23 nt, synthetic construct
  source 1..23: mol_type = other RNA
tagtgaaaaactgggaaaggttt

SEQ ID NO: 2488 - RNA, 23 nt, synthetic construct
  source 1..23: mol_type = other RNA
atttagcacctctgaaagaattt

SEQ ID NO: 2489 - RNA, 23 nt, synthetic construct
  source 1..23: mol_type = other RNA
acaactcagctcagaggctggtt

SEQ ID NO: 2490 - RNA, 23 nt, synthetic construct
  source 1..23: mol_type = other RNA
aaaccaactcagctcagaggctt

SEQ ID NO: 2491 - RNA, 23 nt, synthetic construct
  source 1..23: mol_type = other RNA
ataaaaccaactcagctcagatt

SEQ ID NO: 2492 - RNA, 23 nt, synthetic construct
  source 1..23: mol_type = other RNA
ttcataaaaccaactcagctctt

SEQ ID NO: 2493 - RNA, 23 nt, synthetic construct
  source 1..23: mol_type = other RNA
tttcataaaaccaactcagcttt

SEQ ID NO: 2494 - RNA, 23 nt, synthetic construct
  source 1..23: mol_type = other RNA
ttttcataaaaccaactcagctt

SEQ ID NO: 2495 - RNA, 23 nt, synthetic construct
  source 1..23: mol_type = other RNA
actagcttttcataaaaccaatt

SEQ ID NO: 2496 - RNA, 23 nt, synthetic construct
  source 1..23: mol_type = other RNA
acttcctagcttttcataaaatt

SEQ ID NO: 2497 - RNA, 23 nt, synthetic construct
  source 1..23: mol_type = other RNA
aatttcccaaccagctgaatttt

SEQ ID NO: 2498 - RNA, 23 nt, synthetic construct
  source 1..23: mol_type = other RNA
tcatttcccaaccagctgaattt

SEQ ID NO: 2499 - RNA, 23 nt, synthetic construct
  source 1..23: mol_type = other RNA
atgtcatttcccaaccagctgtt

SEQ ID NO: 2500 - RNA, 23 nt, synthetic construct
  source 1..23: mol_type = other RNA
tggtgtcatttcccaaccagctt

SEQ ID NO: 2501 - RNA, 23 nt, synthetic construct
  source 1..23: mol_type = other RNA
aagtcagtaagggaccctctgtt

SEQ ID NO: 2502 - RNA, 23 nt, synthetic construct
  source 1..23: mol_type = other RNA
agtctgaccattaatagggcctt

SEQ ID NO: 2503 - RNA, 23 nt, synthetic construct
  source 1..23: mol_type = other RNA
aagtctgaccattaatagggctt

SEQ ID NO: 2504 - RNA, 23 nt, synthetic construct
  source 1..23: mol_type = other RNA
acaccccacaagatcacacattt

SEQ ID NO: 2505 - RNA, 23 nt, synthetic construct
  source 1..23: mol_type = other RNA
tccaccccacaagatcacacatt

SEQ ID NO: 2506 - RNA, 23 nt, synthetic construct
  source 1..23: mol_type = other RNA
atccaccccacaagatcacactt

SEQ ID NO: 2507 - RNA, 23 nt, synthetic construct
  source 1..23: mol_type = other RNA
tagttaggtgaaaaaggtgtttt

SEQ ID NO: 2508 - RNA, 23 nt, synthetic construct
  source 1..23: mol_type = other RNA
agtcctgatccgcagcagctctt

SEQ ID NO: 2509 - RNA, 23 nt, synthetic construct
  source 1..23: mol_type = other RNA
actttagggcagatgtcgtactt

SEQ ID NO: 2510 - RNA, 23 nt, synthetic construct
  source 1..23: mol_type = other RNA
tgagacgcaggtggtctagcatt

SEQ ID NO: 2511 - RNA, 23 nt, synthetic construct
  source 1..23: mol_type = other RNA
atgtatccacctttgtctttctt

SEQ ID NO: 2512 - RNA, 23 nt, synthetic construct
  source 1..23: mol_type = other RNA
agcaagttgcaaatcttgctctt

SEQ ID NO: 2513 - RNA, 23 nt, synthetic construct
  source 1..23: mol_type = other RNA
aatgggtagcaagttgcaaattt

SEQ ID NO: 2514 - RNA, 23 nt, synthetic construct
  source 1..23: mol_type = other RNA
atcctcgaaggcatatctctctt

SEQ ID NO: 2515 - RNA, 23 nt, synthetic construct
  source 1..23: mol_type = other RNA
aacgcaggtggtctagcagcttt

SEQ ID NO: 2516 - RNA, 23 nt, synthetic construct
  source 1..23: mol_type = other RNA
ttagttaggtgaaaaaggtgttt

SEQ ID NO: 2517 - RNA, 23 nt, synthetic construct
  source 1..23: mol_type = other RNA
tttagttaggtgaaaaaggtgtt

SEQ ID NO: 2518 - RNA, 23 nt, synthetic construct
  source 1..23: mol_type = other RNA
ttttagttaggtgaaaaaggttt

SEQ ID NO: 2519 - RNA, 23 nt, synthetic construct
  source 1..23: mol_type = other RNA
attttagttaggtgaaaaaggtt

SEQ ID NO: 2520 - RNA, 23 nt, synthetic construct
  source 1..23: mol_type = other RNA
tattttagttaggtgaaaaagtt

SEQ ID NO: 2521 - RNA, 23 nt, synthetic construct
  source 1..23: mol_type = other RNA
attattttagttaggtgaaaatt

SEQ ID NO: 2522 - RNA, 23 nt, synthetic construct
  source 1..23: mol_type = other RNA
aactctttaaacattattttatt

SEQ ID NO: 2523 - RNA, 23 nt, synthetic construct
  source 1..23: mol_type = other RNA
agaaaaaaagaacgcagaccatt

SEQ ID NO: 2524 - RNA, 23 nt, synthetic construct
  source 1..23: mol_type = other RNA
aagaaaaaaagaacgcagacctt

SEQ ID NO: 2525 - RNA, 23 nt, synthetic construct
  source 1..23: mol_type = other RNA
aaatgagaagatgcaaggagatt

SEQ ID NO: 2526 - RNA, 23 nt, synthetic construct
  source 1..23: mol_type = other RNA
agaatgagaagatgcaaggagtt

SEQ ID NO: 2527 - RNA, 23 nt, synthetic construct
  source 1..23: mol_type = other RNA
aagaatgagaagatgcaaggatt

SEQ ID NO: 2528 - RNA, 23 nt, synthetic construct
  source 1..23: mol_type = other RNA
agagaatgagaagatgcaaggtt

SEQ ID NO: 2529 - RNA, 23 nt, synthetic construct
  source 1..23: mol_type = other RNA
aagaggttggggtgatcagagtt

SEQ ID NO: 2530 - RNA, 23 nt, synthetic construct
  source 1..23: mol_type = other RNA
agacagagagaggttggggtgtt

SEQ ID NO: 2531 - RNA, 23 nt, synthetic construct
  source 1..23: mol_type = other RNA
attgtctccatcaaggctggctt

SEQ ID NO: 2532 - RNA, 23 nt, synthetic construct
  source 1..23: mol_type = other RNA
agcttgtctccatcaaggctgtt

SEQ ID NO: 2533 - RNA, 23 nt, synthetic construct
  source 1..23: mol_type = other RNA
aggcttgtctccatcaaggcttt

SEQ ID NO: 2534 - RNA, 23 nt, synthetic construct
  source 1..23: mol_type = other RNA
aaagggcttgtctccatcaagtt

SEQ ID NO: 2535 - RNA, 23 nt, synthetic construct
  source 1..23: mol_type = other RNA
tcaagggcttgtctccatcaatt

SEQ ID NO: 2536 - RNA, 23 nt, synthetic construct
  source 1..23: mol_type = other RNA
tctcaagggcttgtctccatctt

SEQ ID NO: 2537 - RNA, 23 nt, synthetic construct
  source 1..23: mol_type = other RNA
agtctcaagggcttgtctccatt

SEQ ID NO: 2538 - RNA, 23 nt, synthetic construct
  source 1..23: mol_type = other RNA
agtcatattacactgaccttgtt

SEQ ID NO: 2539 - RNA, 23 nt, synthetic construct
  source 1..23: mol_type = other RNA
aagtcatattacactgacctttt

SEQ ID NO: 2540 - RNA, 23 nt, synthetic construct
  source 1..23: mol_type = other RNA
atcagtcatattacactgacctt

SEQ ID NO: 2541 - RNA, 23 nt, synthetic construct
  source 1..23: mol_type = other RNA
aaaatgcataaatagaaaaaatt

SEQ ID NO: 2542 - RNA, 23 nt, synthetic construct
  source 1..23: mol_type = other RNA
aatttaacagtttgagcacactt

SEQ ID NO: 2543 - RNA, 23 nt, synthetic construct
  source 1..23: mol_type = other RNA
tctttcttttccaacatttaatt

SEQ ID NO: 2544 - RNA, 23 nt, synthetic construct
  source 1..23: mol_type = other RNA
atcagtcaagtgctttgtctgtt

SEQ ID NO: 2545 - RNA, 23 nt, synthetic construct
  source 1..23: mol_type = other RNA
acctagaacccgtttcctttatt

SEQ ID NO: 2546 - RNA, 23 nt, synthetic construct
  source 1..23: mol_type = other RNA
tccctagaacccgtttccttttt

SEQ ID NO: 2547 - RNA, 23 nt, synthetic construct
  source 1..23: mol_type = other RNA
tgtccctagaacccgtttccttt

SEQ ID NO: 2548 - RNA, 23 nt, synthetic construct
  source 1..23: mol_type = other RNA
atttgtccctagaacccgttttt

SEQ ID NO: 2549 - RNA, 23 nt, synthetic construct
  source 1..23: mol_type = other RNA
aagtttgtccctagaacccgttt

SEQ ID NO: 2550 - RNA, 23 nt, synthetic construct
  source 1..23: mol_type = other RNA
agagtttgtccctagaacccgtt

SEQ ID NO: 2551 - RNA, 23 nt, synthetic construct
  source 1..23: mol_type = other RNA
tagagtttgtccctagaaccctt

SEQ ID NO: 2552 - RNA, 23 nt, synthetic construct
  source 1..23: mol_type = other RNA
atagagtttgtccctagaacctt

SEQ ID NO: 2553 - RNA, 23 nt, synthetic construct
  source 1..23: mol_type = other RNA
attttctcaaagagttcacggtt

SEQ ID NO: 2554 - RNA, 23 nt, synthetic construct
  source 1..23: mol_type = other RNA
atcttttctcaaagagttcactt

SEQ ID NO: 2555 - RNA, 23 nt, synthetic construct
  source 1..23: mol_type = other RNA
atagcctcttttctcaaagagtt

SEQ ID NO: 2556 - RNA, 23 nt, synthetic construct
  source 1..23: mol_type = other RNA
aagtagcctcttttctcaaagtt

SEQ ID NO: 2557 - RNA, 23 nt, synthetic construct
  source 1..23: mol_type = other RNA
tttcacaagtagcctcttttctt

SEQ ID NO: 2558 - RNA, 23 nt, synthetic construct
  source 1..23: mol_type = other RNA
tattttcacaagtagcctctttt

SEQ ID NO: 2559 - RNA, 23 nt, synthetic construct
  source 1..23: mol_type = other RNA
ttattttcacaagtagcctcttt

SEQ ID NO: 2560 - RNA, 23 nt, synthetic construct
  source 1..23: mol_type = other RNA
taagaaggcaggttcaaaccctt

SEQ ID NO: 2561 - RNA, 23 nt, synthetic construct
  source 1..23: mol_type = other RNA
atgtaagaaggcaggttcaaatt

SEQ ID NO: 2562 - RNA, 23 nt, synthetic construct
  source 1..23: mol_type = other RNA
tcaagatgtaagaaggcaggttt

SEQ ID NO: 2563 - RNA, 23 nt, synthetic construct
  source 1..23: mol_type = other RNA
atcaagatgtaagaaggcaggtt

SEQ ID NO: 2564 - RNA, 23 nt, synthetic construct
  source 1..23: mol_type = other RNA
actcaagatgtaagaaggcagtt

SEQ ID NO: 2565 - RNA, 23 nt, synthetic construct
  source 1..23: mol_type = other RNA
acctcaagatgtaagaaggcatt

SEQ ID NO: 2566 - RNA, 23 nt, synthetic construct
  source 1..23: mol_type = other RNA
accctcaagatgtaagaaggctt

SEQ ID NO: 2567 - RNA, 23 nt, synthetic construct
  source 1..23: mol_type = other RNA
aggccttgggaactcacttagtt

SEQ ID NO: 2568 - RNA, 23 nt, synthetic construct
  source 1..23: mol_type = other RNA
aagaggccttgggaactcacttt

SEQ ID NO: 2569 - RNA, 23 nt, synthetic construct
  source 1..23: mol_type = other RNA
aaacagaggccttgggaactctt

SEQ ID NO: 2570 - RNA, 23 nt, synthetic construct
  source 1..23: mol_type = other RNA
tgaacagaggccttgggaacttt

SEQ ID NO: 2571 - RNA, 23 nt, synthetic construct
  source 1..23: mol_type = other RNA
atgaacagaggccttgggaactt

SEQ ID NO: 2572 - RNA, 23 nt, synthetic construct
  source 1..23: mol_type = other RNA
aacctgagctcactgacggagtt

SEQ ID NO: 2573 - RNA, 23 nt, synthetic construct
  source 1..23: mol_type = other RNA
acacccggtggggttgggggttt

SEQ ID NO: 2574 - RNA, 23 nt, synthetic construct
  source 1..23: mol_type = other RNA
aacacccggtggggttgggggtt

SEQ ID NO: 2575 - RNA, 23 nt, synthetic construct
  source 1..23: mol_type = other RNA
tgacacccggtggggttggggtt

SEQ ID NO: 2576 - RNA, 23 nt, synthetic construct
  source 1..23: mol_type = other RNA
atgacacccggtggggttgggtt

SEQ ID NO: 2577 - RNA, 23 nt, synthetic construct
  source 1..23: mol_type = other RNA
attgctctgacacccggtgggtt

SEQ ID NO: 2578 - RNA, 23 nt, synthetic construct
  source 1..23: mol_type = other RNA
acccattccagctccatggggtt

SEQ ID NO: 2579 - RNA, 23 nt, synthetic construct
  source 1..23: mol_type = other RNA
tccaccccattccagctccattt

SEQ ID NO: 2580 - RNA, 23 nt, synthetic construct
  source 1..23: mol_type = other RNA
atccaccccattccagctccatt

SEQ ID NO: 2581 - RNA, 23 nt, synthetic construct
  source 1..23: mol_type = other RNA
actccaccccattccagctcctt

SEQ ID NO: 2582 - RNA, 23 nt, synthetic construct
  source 1..23: mol_type = other RNA
aagaaacttgtaactttcctttt

SEQ ID NO: 2583 - RNA, 23 nt, synthetic construct
  source 1..23: mol_type = other RNA
aaaaagaaacttgtaactttctt

SEQ ID NO: 2584 - RNA, 23 nt, synthetic construct
  source 1..23: mol_type = other RNA
agaaaagaaacttgtaacttttt

SEQ ID NO: 2585 - RNA, 23 nt, synthetic construct
  source 1..23: mol_type = other RNA
ttgggaaaagaaacttgtaactt

SEQ ID NO: 2586 - RNA, 23 nt, synthetic construct
  source 1..23: mol_type = other RNA
aaacttgggaaaagaaacttgtt

SEQ ID NO: 2587 - RNA, 23 nt, synthetic construct
  source 1..23: mol_type = other RNA
aaaacttgggaaaagaaactttt

SEQ ID NO: 2588 - RNA, 23 nt, synthetic construct
  source 1..23: mol_type = other RNA
atgggaaacttgggaaaagaatt

SEQ ID NO: 2589 - RNA, 23 nt, synthetic construct
  source 1..23: mol_type = other RNA
tctgctaatgaccgaaggcgttt

SEQ ID NO: 2590 - RNA, 23 nt, synthetic construct
  source 1..23: mol_type = other RNA
agaaaatactgttggccgggctt

SEQ ID NO: 2591 - RNA, 23 nt, synthetic construct
  source 1..23: mol_type = other RNA
tagaaaatactgttggccgggtt

SEQ ID NO: 2592 - RNA, 23 nt, synthetic construct
  source 1..23: mol_type = other RNA
ttagaaaatactgttggccggtt

SEQ ID NO: 2593 - RNA, 23 nt, synthetic construct
  source 1..23: mol_type = other RNA
attagaaaatactgttggccgtt

SEQ ID NO: 2594 - RNA, 23 nt, synthetic construct
  source 1..23: mol_type = other RNA
tattagaaaatactgttggcctt

SEQ ID NO: 2595 - RNA, 23 nt, synthetic construct
  source 1..23: mol_type = other RNA
ttattagaaaatactgttggctt

SEQ ID NO: 2596 - RNA, 23 nt, synthetic construct
  source 1..23: mol_type = other RNA
actgataacaatcacaatacctt

SEQ ID NO: 2597 - RNA, 23 nt, synthetic construct
  source 1..23: mol_type = other RNA
tcctgataacaatcacaatactt

SEQ ID NO: 2598 - RNA, 23 nt, synthetic construct
  source 1..23: mol_type = other RNA
tttttcctgataacaatcacatt

SEQ ID NO: 2599 - RNA, 23 nt, synthetic construct
  source 1..23: mol_type = other RNA
ttttttcctgataacaatcactt

SEQ ID NO: 2600 - RNA, 23 nt, synthetic construct
  source 1..23: mol_type = other RNA
tattttttcctgataacaatctt

SEQ ID NO: 2601 - RNA, 23 nt, synthetic construct
  source 1..23: mol_type = other RNA
atattttttcctgataacaattt

SEQ ID NO: 2602 - RNA, 23 nt, synthetic construct
  source 1..23: mol_type = other RNA
atatattttttcctgataacatt

SEQ ID NO: 2603 - RNA, 23 nt, synthetic construct
  source 1..23: mol_type = other RNA
aagcagaaagaaaatacgtcctt

SEQ ID NO: 2604 - RNA, 23 nt, synthetic construct
  source 1..23: mol_type = other RNA
tgaataatttttaaaagcagatt

SEQ ID NO: 2605 - RNA, 23 nt, synthetic construct
  source 1..23: mol_type = other RNA
tgcctcagccaacccactaattt

SEQ ID NO: 2606 - RNA, 23 nt, synthetic construct
  source 1..23: mol_type = other RNA
atgatttccttatcttgatactt

SEQ ID NO: 2607 - RNA, 23 nt, synthetic construct
  source 1..23: mol_type = other RNA
tcctgatttccttatcttgattt

SEQ ID NO: 2608 - RNA, 23 nt, synthetic construct
  source 1..23: mol_type = other RNA
aacttcctgatttccttatcttt

SEQ ID NO: 2609 - RNA, 23 nt, synthetic construct
  source 1..23: mol_type = other RNA
acacttcctgatttccttatctt

SEQ ID NO: 2610 - RNA, 23 nt, synthetic construct
  source 1..23: mol_type = other RNA
ttacacttcctgatttccttatt

SEQ ID NO: 2611 - RNA, 23 nt, synthetic construct
  source 1..23: mol_type = other RNA
attacacttcctgatttcctttt

SEQ ID NO: 2612 - RNA, 23 nt, synthetic construct
  source 1..23: mol_type = other RNA
attggccatttctataagaattt

SEQ ID NO: 2613 - RNA, 23 nt, synthetic construct
  source 1..23: mol_type = other RNA
acttggccatttctataagaatt

SEQ ID NO: 2614 - RNA, 23 nt, synthetic construct
  source 1..23: mol_type = other RNA
aggattgggtagcatctgaggtt

SEQ ID NO: 2615 - RNA, 23 nt, synthetic construct
  source 1..23: mol_type = other RNA
agggattgggtagcatctgagtt

SEQ ID NO: 2616 - RNA, 23 nt, synthetic construct
  source 1..23: mol_type = other RNA
aggtgccttctggagggacagtt

SEQ ID NO: 2617 - RNA, 23 nt, synthetic construct
  source 1..23: mol_type = other RNA
agggtgccttctggagggacatt

SEQ ID NO: 2618 - RNA, 23 nt, synthetic construct
  source 1..23: mol_type = other RNA
aagggtgccttctggagggactt

SEQ ID NO: 2619 - RNA, 23 nt, synthetic construct
  source 1..23: mol_type = other RNA
aaagggtgccttctggagggatt

SEQ ID NO: 2620 - RNA, 23 nt, synthetic construct
  source 1..23: mol_type = other RNA
aaaagggtgccttctggagggtt

SEQ ID NO: 2621 - RNA, 23 nt, synthetic construct
  source 1..23: mol_type = other RNA
acaaagggtgccttctggaggtt

SEQ ID NO: 2622 - RNA, 23 nt, synthetic construct
  source 1..23: mol_type = other RNA
agcaaagggtgccttctggagtt

SEQ ID NO: 2623 - RNA, 23 nt, synthetic construct
  source 1..23: mol_type = other RNA
taagcaaagggtgccttctggtt

SEQ ID NO: 2624 - RNA, 23 nt, synthetic construct
  source 1..23: mol_type = other RNA
acctaagcaaagggtgccttctt

SEQ ID NO: 2625 - RNA, 23 nt, synthetic construct
  source 1..23: mol_type = other RNA
agcctaagcaaagggtgcctttt

SEQ ID NO: 2626 - RNA, 23 nt, synthetic construct
  source 1..23: mol_type = other RNA
aggcctaagcaaagggtgccttt

SEQ ID NO: 2627 - RNA, 23 nt, synthetic construct
  source 1..23: mol_type = other RNA
agaagagagggaggcctaagctt

SEQ ID NO: 2628 - RNA, 23 nt, synthetic construct
  source 1..23: mol_type = other RNA
aagaggtggttcaggaagagatt

SEQ ID NO: 2629 - RNA, 23 nt, synthetic construct
  source 1..23: mol_type = other RNA
agaatgcattcataggccaattt

SEQ ID NO: 2630 - RNA, 23 nt, synthetic construct
  source 1..23: mol_type = other RNA
aataagaatgcattcataggctt

SEQ ID NO: 2631 - RNA, 23 nt, synthetic construct
  source 1..23: mol_type = other RNA
aaataagaatgcattcataggtt

SEQ ID NO: 2632 - RNA, 23 nt, synthetic construct
  source 1..23: mol_type = other RNA
atgggaagatggcttgacccctt

SEQ ID NO: 2633 - RNA, 23 nt, synthetic construct
  source 1..23: mol_type = other RNA
tgttggaccaggcatggtagctt

SEQ ID NO: 2634 - RNA, 23 nt, synthetic construct
  source 1..23: mol_type = other RNA
agaatgttggaccaggcatggtt

SEQ ID NO: 2635 - RNA, 23 nt, synthetic construct
  source 1..23: mol_type = other RNA
aaatgaagaatgttggaccagtt

SEQ ID NO: 2636 - RNA, 23 nt, synthetic construct
  source 1..23: mol_type = other RNA
aaggctcatactctgcactaatt

SEQ ID NO: 2637 - RNA, 23 nt, synthetic construct
  source 1..23: mol_type = other RNA
atcaggctcatactctgcacttt

SEQ ID NO: 2638 - RNA, 23 nt, synthetic construct
  source 1..23: mol_type = other RNA
aatcaggctcatactctgcactt

SEQ ID NO: 2639 - RNA, 23 nt, synthetic construct
  source 1..23: mol_type = other RNA
agatacatatacacacccacatt

SEQ ID NO: 2640 - RNA, 23 nt, synthetic construct
  source 1..23: mol_type = other RNA
aagtctttttatatacactcatt

SEQ ID NO: 2641 - RNA, 23 nt, synthetic construct
  source 1..23: mol_type = other RNA
ttcagtctttttatatacacttt

SEQ ID NO: 2642 - RNA, 23 nt, synthetic construct
  source 1..23: mol_type = other RNA
tttcagtctttttatatacactt

SEQ ID NO: 2643 - RNA, 23 nt, synthetic construct
  source 1..23: mol_type = other RNA
atctttcagtctttttatatatt

SEQ ID NO: 2644 - RNA, 23 nt, synthetic construct
  source 1..23: mol_type = other RNA
acccagccctctttcagtctttt

SEQ ID NO: 2645 - RNA, 23 nt, synthetic construct
  source 1..23: mol_type = other RNA
tgcccagccctctttcagtcttt

SEQ ID NO: 2646 - RNA, 23 nt, synthetic construct
  source 1..23: mol_type = other RNA
atgcatctcgggtcactgcaatt

SEQ ID NO: 2647 - RNA, 23 nt, synthetic construct
  source 1..23: mol_type = other RNA
aggttttgatatatatccttatt

SEQ ID NO: 2648 - RNA, 23 nt, synthetic construct
  source 1..23: mol_type = other RNA
taagggttttgatatatatcctt

SEQ ID NO: 2649 - RNA, 23 nt, synthetic construct
  source 1..23: mol_type = other RNA
aataagggttttgatatatattt

SEQ ID NO: 2650 - RNA, 23 nt, synthetic construct
  source 1..23: mol_type = other RNA
acataagggttttgatatatatt

SEQ ID NO: 2651 - RNA, 23 nt, synthetic construct
  source 1..23: mol_type = other RNA
accataagggttttgatatattt

SEQ ID NO: 2652 - RNA, 23 nt, synthetic construct
  source 1..23: mol_type = other RNA
tgccataagggttttgatatatt

SEQ ID NO: 2653 - RNA, 23 nt, synthetic construct
  source 1..23: mol_type = other RNA
aaattacaaataacagtctgctt

SEQ ID NO: 2654 - RNA, 23 nt, synthetic construct
  source 1..23: mol_type = other RNA
atgggtcgggatcgggaatcgtt

SEQ ID NO: 2655 - RNA, 23 nt, synthetic construct
  source 1..23: mol_type = other RNA
aggatctgggtcgggatcgggtt

SEQ ID NO: 2656 - RNA, 23 nt, synthetic construct
  source 1..23: mol_type = other RNA
atcgctcaggcagcgggtcgctt

SEQ ID NO: 2657 - RNA, 23 nt, synthetic construct
  source 1..23: mol_type = other RNA
atgctcgctcaggcagcgggttt

SEQ ID NO: 2658 - RNA, 23 nt, synthetic construct
  source 1..23: mol_type = other RNA
tgccaatgttccgactcctggtt

SEQ ID NO: 2659 - RNA, 23 nt, synthetic construct
  source 1..23: mol_type = other RNA
aatgccaatgttccgactccttt

SEQ ID NO: 2660 - RNA, 23 nt, synthetic construct
  source 1..23: mol_type = other RNA
agatgccaatgttccgactcctt

SEQ ID NO: 2661 - RNA, 23 nt, synthetic construct
  source 1..23: mol_type = other RNA
aagatgccaatgttccgactctt

SEQ ID NO: 2662 - RNA, 23 nt, synthetic construct
  source 1..23: mol_type = other RNA
acttcgtctttggaccgaaagtt

SEQ ID NO: 2663 - RNA, 23 nt, synthetic construct
  source 1..23: mol_type = other RNA
ttgttttggcatcaatgaaggtt

SEQ ID NO: 2664 - RNA, 23 nt, synthetic construct
  source 1..23: mol_type = other RNA
attgttttggcatcaatgaagtt

SEQ ID NO: 2665 - RNA, 23 nt, synthetic construct
  source 1..23: mol_type = other RNA
agttgttttggcatcaatgaatt

SEQ ID NO: 2666 - RNA, 23 nt, synthetic construct
  source 1..23: mol_type = other RNA
atggttgttttggcatcaatgtt

SEQ ID NO: 2667 - RNA, 23 nt, synthetic construct
  source 1..23: mol_type = other RNA
atgatggttgttttggcatcatt

SEQ ID NO: 2668 - RNA, 23 nt, synthetic construct
  source 1..23: mol_type = other RNA
agtgatggttgttttggcatctt

SEQ ID NO: 2669 - RNA, 23 nt, synthetic construct
  source 1..23: mol_type = other RNA
aggtgatggttgttttggcattt

SEQ ID NO: 2670 - RNA, 23 nt, synthetic construct
  source 1..23: mol_type = other RNA
aggacacggtgatggttgttttt

SEQ ID NO: 2671 - RNA, 23 nt, synthetic construct
  source 1..23: mol_type = other RNA
agggacacggtgatggttgtttt

SEQ ID NO: 2672 - RNA, 23 nt, synthetic construct
  source 1..23: mol_type = other RNA
agagagggtgtccaggatgcttt

SEQ ID NO: 2673 - RNA, 23 nt, synthetic construct
  source 1..23: mol_type = other RNA
acgagagggtgtccaggatgctt

SEQ ID NO: 2674 - RNA, 23 nt, synthetic construct
  source 1..23: mol_type = other RNA
tcactcagtgctgtagcgagctt

SEQ ID NO: 2675 - RNA, 23 nt, synthetic construct
  source 1..23: mol_type = other RNA
atggtgtcatttcccaaccagtt

SEQ ID NO: 2676 - RNA, 23 nt, synthetic construct
  source 1..23: mol_type = other RNA
tcctggtgtcatttcccaacctt

SEQ ID NO: 2677 - RNA, 23 nt, synthetic construct
  source 1..23: mol_type = other RNA
aaaaaggtgttctaaaattaatt

SEQ ID NO: 2678 - RNA, 23 nt, synthetic construct
  source 1..23: mol_type = other RNA
tgaaaaaggtgttctaaaatttt

SEQ ID NO: 2679 - RNA, 23 nt, synthetic construct
  source 1..23: mol_type = other RNA
atgaaaaaggtgttctaaaattt

SEQ ID NO: 2680 - RNA, 23 nt, synthetic construct
  source 1..23: mol_type = other RNA
agtgaaaaaggtgttctaaaatt

SEQ ID NO: 2681 - RNA, 23 nt, synthetic construct
  source 1..23: mol_type = other RNA
taggtgaaaaaggtgttctaatt

SEQ ID NO: 2682 - RNA, 23 nt, synthetic construct
  source 1..23: mol_type = other RNA
acataatacaaaattcaacagtt

SEQ ID NO: 2683 - RNA, 23 nt, synthetic construct
  source 1..23: mol_type = other RNA
aacataatacaaaattcaacatt

SEQ ID NO: 2684 - RNA, 23 nt, synthetic construct
  source 1..23: mol_type = other RNA
tcacataatacaaaattcaactt

SEQ ID NO: 2685 - RNA, 23 nt, synthetic construct
  source 1..23: mol_type = other RNA
tgattcacataatacaaaatttt

SEQ ID NO: 2686 - RNA, 23 nt, synthetic construct
  source 1..23: mol_type = other RNA
atgattcacataatacaaaattt

SEQ ID NO: 2687 - RNA, 23 nt, synthetic construct
  source 1..23: mol_type = other RNA
acctgcacactagattatttttt

SEQ ID NO: 2688 - RNA, 23 nt, synthetic construct
  source 1..23: mol_type = other RNA
aattatcacacctggggaaaatt

SEQ ID NO: 2689 - RNA, 23 nt, synthetic construct
  source 1..23: mol_type = other RNA
tttaaagggtctgtcttctcatt

SEQ ID NO: 2690 - RNA, 23 nt, synthetic construct
  source 1..23: mol_type = other RNA
atttaaagggtctgtcttctctt

SEQ ID NO: 2691 - RNA, 23 nt, synthetic construct
  source 1..23: mol_type = other RNA
tcctttaaagggtctgtcttctt

SEQ ID NO: 2692 - RNA, 23 nt, synthetic construct
  source 1..23: mol_type = other RNA
ttcctttaaagggtctgtctttt

SEQ ID NO: 2693 - RNA, 23 nt, synthetic construct
  source 1..23: mol_type = other RNA
tttcctttaaagggtctgtcttt

SEQ ID NO: 2694 - RNA, 23 nt, synthetic construct
  source 1..23: mol_type = other RNA
atttcctttaaagggtctgtctt

SEQ ID NO: 2695 - RNA, 23 nt, synthetic construct
  source 1..23: mol_type = other RNA
atttattaggagttattttcttt

SEQ ID NO: 2696 - RNA, 23 nt, synthetic construct
  source 1..23: mol_type = other RNA
tttattaggagttattttctctt

SEQ ID NO: 2697 - RNA, 23 nt, synthetic construct
  source 1..23: mol_type = other RNA
ttattaggagttattttctcatt

SEQ ID NO: 2698 - RNA, 23 nt, synthetic construct
  source 1..23: mol_type = other RNA
tattaggagttattttctcattt

SEQ ID NO: 2699 - RNA, 23 nt, synthetic construct
  source 1..23: mol_type = other RNA
agttattttctcatgctgaaatt

SEQ ID NO: 2700 - RNA, 23 nt, synthetic construct
  source 1..23: mol_type = other RNA
ttttctcatgctgaaagtgattt

SEQ ID NO: 2701 - RNA, 23 nt, synthetic construct
  source 1..23: mol_type = other RNA
tttctcatgctgaaagtgatgtt

SEQ ID NO: 2702 - RNA, 23 nt, synthetic construct
  source 1..23: mol_type = other RNA
ttctcatgctgaaagtgatgctt

SEQ ID NO: 2703 - RNA, 23 nt, synthetic construct
  source 1..23: mol_type = other RNA
agttcaccatagaaacttgggtt

SEQ ID NO: 2704 - RNA, 23 nt, synthetic construct
  source 1..23: mol_type = other RNA
attcaccatagaaacttgggctt

SEQ ID NO: 2705 - RNA, 23 nt, synthetic construct
  source 1..23: mol_type = other RNA
tcaccatagaaacttgggcaatt

SEQ ID NO: 2706 - RNA, 23 nt, synthetic construct
  source 1..23: mol_type = other RNA
aaccatagaaacttgggcaactt

SEQ ID NO: 2707 - RNA, 23 nt, synthetic construct
  source 1..23: mol_type = other RNA
acatagaaacttgggcaacactt

SEQ ID NO: 2708 - RNA, 23 nt, synthetic construct
  source 1..23: mol_type = other RNA
aatagaaacttgggcaacacatt

SEQ ID NO: 2709 - RNA, 23 nt, synthetic construct
  source 1..23: mol_type = other RNA
atagaaacttgggcaacacattt

SEQ ID NO: 2710 - RNA, 23 nt, synthetic construct
  source 1..23: mol_type = other RNA
tagaaacttgggcaacacatatt

SEQ ID NO: 2711 - RNA, 23 nt, synthetic construct
  source 1..23: mol_type = other RNA
taagcacgacaaataaaatactt

SEQ ID NO: 2712 - RNA, 23 nt, synthetic construct
  source 1..23: mol_type = other RNA
aagcacgacaaataaaatacatt

SEQ ID NO: 2713 - RNA, 23 nt, synthetic construct
  source 1..23: mol_type = other RNA
agcacgacaaataaaatacaatt

SEQ ID NO: 2714 - RNA, 23 nt, synthetic construct
  source 1..23: mol_type = other RNA
acacgacaaataaaatacaattt

SEQ ID NO: 2715 - RNA, 23 nt, synthetic construct
  source 1..23: mol_type = other RNA
aacgacaaataaaatacaatttt

SEQ ID NO: 2716 - RNA, 23 nt, synthetic construct
  source 1..23: mol_type = other RNA
aatgaagaatgttggaccaggtt

SEQ ID NO: 2717 - RNA, 23 nt, synthetic construct
  source 1..23: mol_type = other RNA
aagaatgttggaccaggcatgtt

SEQ ID NO: 2718 - RNA, 23 nt, synthetic construct
  source 1..23: mol_type = other RNA
atgttggaccaggcatggtagtt

SEQ ID NO: 2719 - RNA, 23 nt, synthetic construct
  source 1..23: mol_type = other RNA
aaagagagggaggcctaagcatt

SEQ ID NO: 2720 - RNA, 23 nt, synthetic construct
  source 1..23: mol_type = other RNA
acgggattgggtagcatctgatt

SEQ ID NO: 2721 - RNA, 23 nt, synthetic construct
  source 1..23: mol_type = other RNA
ttctcagtcaagtgctttgtctt

SEQ ID NO: 2722 - RNA, 23 nt, synthetic construct
  source 1..23: mol_type = other RNA
attacacaatatgggtaagggtt

SEQ ID NO: 2723 - RNA, 23 nt, synthetic construct
  source 1..23: mol_type = other RNA
aacatttaacagtttgagcactt

SEQ ID NO: 2724 - RNA, 23 nt, synthetic construct
  source 1..23: mol_type = other RNA
aaaaaaagaacgcagaccagatt

SEQ ID NO: 2725 - RNA, 23 nt, synthetic construct
  source 1..23: mol_type = other RNA
taaaatacaattacaaataactt

SEQ ID NO: 2726 - RNA, 23 nt, synthetic construct
  source 1..23: mol_type = other RNA
aaaaaaagaatgttgccgccttt

SEQ ID NO: 2727 - RNA, 23 nt, synthetic construct
  source 1..23: mol_type = other RNA
actacatactgattattcctgtt

SEQ ID NO: 2728 - RNA, 23 nt, synthetic construct
  source 1..23: mol_type = other RNA
atacatactgattattcctgatt

SEQ ID NO: 2729 - RNA, 23 nt, synthetic construct
  source 1..23: mol_type = other RNA
tacatactgattattcctgagtt

SEQ ID NO: 2730 - RNA, 23 nt, synthetic construct
  source 1..23: mol_type = other RNA
aatactgattattcctgagagtt

SEQ ID NO: 2731 - RNA, 23 nt, synthetic construct
  source 1..23: mol_type = other RNA
atactgattattcctgagagttt

SEQ ID NO: 2732 - RNA, 23 nt, synthetic construct
  source 1..23: mol_type = other RNA
taaattaaagggaaggctttatt

SEQ ID NO: 2733 - RNA, 23 nt, synthetic construct
  source 1..23: mol_type = other RNA
aaattaaagggaaggctttattt

SEQ ID NO: 2734 - RNA, 23 nt, synthetic construct
  source 1..23: mol_type = other RNA
aattaaagggaaggctttatttt

SEQ ID NO: 2735 - RNA, 23 nt, synthetic construct
  source 1..23: mol_type = other RNA
attaaagggaaggctttattttt

SEQ ID NO: 2736 - RNA, 23 nt, synthetic construct
  source 1..23: mol_type = other RNA
ttaaagggaaggctttatttgtt

SEQ ID NO: 2737 - RNA, 23 nt, synthetic construct
  source 1..23: mol_type = other RNA
tccagaggtggttcaggaagatt

SEQ ID NO: 2738 - RNA, 23 nt, synthetic construct
  source 1..23: mol_type = other RNA
actatcagccatttaatatattt

SEQ ID NO: 2739 - RNA, 23 nt, synthetic construct
  source 1..23: mol_type = other RNA
agtcacaaggaggccacgtggtt

SEQ ID NO: 2740 - RNA, 23 nt, synthetic construct
  source 1..23: mol_type = other RNA
tatcaagagaacaggcccacgtt

SEQ ID NO: 2741 - RNA, 23 nt, synthetic construct
  source 1..23: mol_type = other RNA
agtttcctttaaagggtctgttt

SEQ ID NO: 2742 - RNA, 23 nt, synthetic construct
  source 1..23: mol_type = other RNA
atcaggcagcgggtcgccccgtt

SEQ ID NO: 2743 - RNA, 23 nt, synthetic construct
  source 1..23: mol_type = other RNA
agcagcgggtcgccccgacgttt

SEQ ID NO: 2744 - RNA, 23 nt, synthetic construct
  source 1..23: mol_type = other RNA
acagcgggtcgccccgacgtgtt

SEQ ID NO: 2745 - RNA, 23 nt, synthetic construct
  source 1..23: mol_type = other RNA
agatctgggtcgggatcgggatt

SEQ ID NO: 2746 - RNA, 23 nt, synthetic construct
  source 1..23: mol_type = other RNA
agccccgcccccctcggaccatt

SEQ ID NO: 2747 - RNA, 23 nt, synthetic construct
  source 1..23: mol_type = other RNA
accccgcccccctcggaccattt

SEQ ID NO: 2748 - RNA, 23 nt, synthetic construct
  source 1..23: mol_type = other RNA
acagcgggataccggagaggatt

SEQ ID NO: 2749 - RNA, 23 nt, synthetic construct
  source 1..23: mol_type = other RNA
acattggccgggaggcatttgtt

SEQ ID NO: 2750 - RNA, 23 nt, synthetic construct
  source 1..23: mol_type = other RNA
tgccggagatgagctggtggatt

SEQ ID NO: 2751 - RNA, 23 nt, synthetic construct
  source 1..23: mol_type = other RNA
ttgccggagatgagctggtggtt

SEQ ID NO: 2752 - RNA, 23 nt, synthetic construct
  source 1..23: mol_type = other RNA
tttgccggagatgagctggtgtt

SEQ ID NO: 2753 - RNA, 23 nt, synthetic construct
  source 1..23: mol_type = other RNA
ttttgccggagatgagctggttt

SEQ ID NO: 2754 - RNA, 23 nt, synthetic construct
  source 1..23: mol_type = other RNA
attttgccggagatgagctggtt

SEQ ID NO: 2755 - RNA, 23 nt, synthetic construct
  source 1..23: mol_type = other RNA
tattttgccggagatgagctgtt

SEQ ID NO: 2756 - RNA, 23 nt, synthetic construct
  source 1..23: mol_type = other RNA
aacactctggtaagagagatgtt

SEQ ID NO: 2757 - RNA, 23 nt, synthetic construct
  source 1..23: mol_type = other RNA
aagacactctggtaagagagatt

SEQ ID NO: 2758 - RNA, 23 nt, synthetic construct
  source 1..23: mol_type = other RNA
atcagacactctggtaagagatt

SEQ ID NO: 2759 - RNA, 23 nt, synthetic construct
  source 1..23: mol_type = other RNA
acgaaagtcagacaccagaactt

SEQ ID NO: 2760 - RNA, 23 nt, synthetic construct
  source 1..23: mol_type = other RNA
accgaaagtcagacaccagaatt

SEQ ID NO: 2761 - RNA, 23 nt, synthetic construct
  source 1..23: mol_type = other RNA
aaccgaaagtcagacaccagatt

SEQ ID NO: 2762 - RNA, 23 nt, synthetic construct
  source 1..23: mol_type = other RNA
tggaccgaaagtcagacaccatt

SEQ ID NO: 2763 - RNA, 23 nt, synthetic construct
  source 1..23: mol_type = other RNA
tcgtctttggaccgaaagtcatt

SEQ ID NO: 2764 - RNA, 23 nt, synthetic construct
  source 1..23: mol_type = other RNA
ttcgtctttggaccgaaagtctt

SEQ ID NO: 2765 - RNA, 23 nt, synthetic construct
  source 1..23: mol_type = other RNA
attcgtctttggaccgaaagttt

SEQ ID NO: 2766 - RNA, 23 nt, synthetic construct
  source 1..23: mol_type = other RNA
ataccaaggcatccacgactttt

SEQ ID NO: 2767 - RNA, 23 nt, synthetic construct
  source 1..23: mol_type = other RNA
aataccaaggcatccacgacttt

SEQ ID NO: 2768 - RNA, 23 nt, synthetic construct
  source 1..23: mol_type = other RNA
acataccaaggcatccacgactt

SEQ ID NO: 2769 - RNA, 23 nt, synthetic construct
  source 1..23: mol_type = other RNA
tgaagcaggaacataccaaggtt

SEQ ID NO: 2770 - RNA, 23 nt, synthetic construct
  source 1..23: mol_type = other RNA
ttgtcactcactcctccatcctt

SEQ ID NO: 2771 - RNA, 23 nt, synthetic construct
  source 1..23: mol_type = other RNA
acgttgtcactcactcctccatt

SEQ ID NO: 2772 - RNA, 23 nt, synthetic construct
  source 1..23: mol_type = other RNA
tacgttgtcactcactcctcctt

SEQ ID NO: 2773 - RNA, 23 nt, synthetic construct
  source 1..23: mol_type = other RNA
atacgttgtcactcactcctctt

SEQ ID NO: 2774 - RNA, 23 nt, synthetic construct
  source 1..23: mol_type = other RNA
agtacgttgtcactcactccttt

SEQ ID NO: 2775 - RNA, 23 nt, synthetic construct
  source 1..23: mol_type = other RNA
attcgtggacttgactttaggtt

SEQ ID NO: 2776 - RNA, 23 nt, synthetic construct
  source 1..23: mol_type = other RNA
agttcgtggacttgactttagtt

SEQ ID NO: 2777 - RNA, 23 nt, synthetic construct
  source 1..23: mol_type = other RNA
aagttcgtggacttgactttatt

SEQ ID NO: 2778 - RNA, 23 nt, synthetic construct
  source 1..23: mol_type = other RNA
agaaagttcgtggacttgacttt

SEQ ID NO: 2779 - RNA, 23 nt, synthetic construct
  source 1..23: mol_type = other RNA
aatgaagaaagttcgtggacttt

SEQ ID NO: 2780 - RNA, 23 nt, synthetic construct
  source 1..23: mol_type = other RNA
aacatgaagaaagttcgtggatt

SEQ ID NO: 2781 - RNA, 23 nt, synthetic construct
  source 1..23: mol_type = other RNA
aactgagcttggtgatgtccatt

SEQ ID NO: 2782 - RNA, 23 nt, synthetic construct
  source 1..23: mol_type = other RNA
agtagactgagcttggtgatgtt

SEQ ID NO: 2783 - RNA, 23 nt, synthetic construct
  source 1..23: mol_type = other RNA
agcgtagactgagcttggtgatt

SEQ ID NO: 2784 - RNA, 23 nt, synthetic construct
  source 1..23: mol_type = other RNA
aggcgtagactgagcttggtgtt

SEQ ID NO: 2785 - RNA, 23 nt, synthetic construct
  source 1..23: mol_type = other RNA
aagaggcgtagactgagcttgtt

SEQ ID NO: 2786 - RNA, 23 nt, synthetic construct
  source 1..23: mol_type = other RNA
atcgagagaaggtagaggttctt

SEQ ID NO: 2787 - RNA, 23 nt, synthetic construct
  source 1..23: mol_type = other RNA
tctcgagagaaggtagaggtttt

SEQ ID NO: 2788 - RNA, 23 nt, synthetic construct
  source 1..23: mol_type = other RNA
agctctcgagagaaggtagagtt

SEQ ID NO: 2789 - RNA, 23 nt, synthetic construct
  source 1..23: mol_type = other RNA
acaaaagctctcgagagaaggtt

SEQ ID NO: 2790 - RNA, 23 nt, synthetic construct
  source 1..23: mol_type = other RNA
aacaaaagctctcgagagaagtt

SEQ ID NO: 2791 - RNA, 23 nt, synthetic construct
  source 1..23: mol_type = other RNA
agacaaaagctctcgagagaatt

SEQ ID NO: 2792 - RNA, 23 nt, synthetic construct
  source 1..23: mol_type = other RNA
aggacaaaagctctcgagagatt

SEQ ID NO: 2793 - RNA, 23 nt, synthetic construct
  source 1..23: mol_type = other RNA
aatccaaatatcctcgaaggctt

SEQ ID NO: 2794 - RNA, 23 nt, synthetic construct
  source 1..23: mol_type = other RNA
acatccaaatatcctcgaaggtt

SEQ ID NO: 2795 - RNA, 23 nt, synthetic construct
  source 1..23: mol_type = other RNA
atgcatccaaatatcctcgaatt

SEQ ID NO: 2796 - RNA, 23 nt, synthetic construct
  source 1..23: mol_type = other RNA
tgaatgcatccaaatatcctctt

SEQ ID NO: 2797 - RNA, 23 nt, synthetic construct
  source 1..23: mol_type = other RNA
aacctgaatgcatccaaatattt

SEQ ID NO: 2798 - RNA, 23 nt, synthetic construct
  source 1..23: mol_type = other RNA
agaacctgaatgcatccaaattt

SEQ ID NO: 2799 - RNA, 23 nt, synthetic construct
  source 1..23: mol_type = other RNA
aagaacctgaatgcatccaaatt

SEQ ID NO: 2800 - RNA, 23 nt, synthetic construct
  source 1..23: mol_type = other RNA
ttccaagaacctgaatgcatctt

SEQ ID NO: 2801 - RNA, 23 nt, synthetic construct
  source 1..23: mol_type = other RNA
agatccatcccttctgaggattt

SEQ ID NO: 2802 - RNA, 23 nt, synthetic construct
  source 1..23: mol_type = other RNA
atcaggatccatcccttctgatt

SEQ ID NO: 2803 - RNA, 23 nt, synthetic construct
  source 1..23: mol_type = other RNA
aacctcaggatccatcccttctt

SEQ ID NO: 2804 - RNA, 23 nt, synthetic construct
  source 1..23: mol_type = other RNA
agcgacctcaggatccatccctt

SEQ ID NO: 2805 - RNA, 23 nt, synthetic construct
  source 1..23: mol_type = other RNA
acccagctgggcatggcgacctt

SEQ ID NO: 2806 - RNA, 23 nt, synthetic construct
  source 1..23: mol_type = other RNA
agactccggggaagaatccagtt

SEQ ID NO: 2807 - RNA, 23 nt, synthetic construct
  source 1..23: mol_type = other RNA
aagccgactccggggaagaattt

SEQ ID NO: 2808 - RNA, 23 nt, synthetic construct
  source 1..23: mol_type = other RNA
agacattatcctaatgggtagtt

SEQ ID NO: 2809 - RNA, 23 nt, synthetic construct
  source 1..23: mol_type = other RNA
aagacattatcctaatgggtatt

SEQ ID NO: 2810 - RNA, 23 nt, synthetic construct
  source 1..23: mol_type = other RNA
ttacataagacattatcctaatt

SEQ ID NO: 2811 - RNA, 23 nt, synthetic construct
  source 1..23: mol_type = other RNA
attacataagacattatcctatt

SEQ ID NO: 2812 - RNA, 23 nt, synthetic construct
  source 1..23: mol_type = other RNA
agcattacataagacattatctt

SEQ ID NO: 2813 - RNA, 23 nt, synthetic construct
  source 1..23: mol_type = other RNA
agtacagggcagcattacatatt

SEQ ID NO: 2814 - RNA, 23 nt, synthetic construct
  source 1..23: mol_type = other RNA
aagattccacaggcagggtactt

SEQ ID NO: 2815 - RNA, 23 nt, synthetic construct
  source 1..23: mol_type = other RNA
agcagattccacaggcagggttt

SEQ ID NO: 2816 - RNA, 23 nt, synthetic construct
  source 1..23: mol_type = other RNA
tggcagattccacaggcagggtt

SEQ ID NO: 2817 - RNA, 23 nt, synthetic construct
  source 1..23: mol_type = other RNA
aggacatcgtcgggcatatcttt

SEQ ID NO: 2818 - RNA, 23 nt, synthetic construct
  source 1..23: mol_type = other RNA
acatcagcactcgagtgaacatt

SEQ ID NO: 2819 - RNA, 23 nt, synthetic construct
  source 1..23: mol_type = other RNA
aagacacatcagcactcgagttt

SEQ ID NO: 2820 - RNA, 23 nt, synthetic construct
  source 1..23: mol_type = other RNA
tgttggctgctcactggcatttt

SEQ ID NO: 2821 - RNA, 23 nt, synthetic construct
  source 1..23: mol_type = other RNA
atcctgctcaggtgtgcatggtt

SEQ ID NO: 2822 - RNA, 23 nt, synthetic construct
  source 1..23: mol_type = other RNA
agccagtcctgctcaggtgtgtt

SEQ ID NO: 2823 - RNA, 23 nt, synthetic construct
  source 1..23: mol_type = other RNA
acctctgctttggtctctgcttt

SEQ ID NO: 2824 - RNA, 23 nt, synthetic construct
  source 1..23: mol_type = other RNA
aaccgcggggtggcctctgcttt

SEQ ID NO: 2825 - RNA, 23 nt, synthetic construct
  source 1..23: mol_type = other RNA
agaccgcggggtggcctctgctt

SEQ ID NO: 2826 - RNA, 23 nt, synthetic construct
  source 1..23: mol_type = other RNA
attgcccaagaagaagttcagtt

SEQ ID NO: 2827 - RNA, 23 nt, synthetic construct
  source 1..23: mol_type = other RNA
tattgcccaagaagaagttcatt

SEQ ID NO: 2828 - RNA, 23 nt, synthetic construct
  source 1..23: mol_type = other RNA
tttattgcccaagaagaagtttt

SEQ ID NO: 2829 - RNA, 23 nt, synthetic construct
  source 1..23: mol_type = other RNA
atttattgcccaagaagaagttt

SEQ ID NO: 2830 - RNA, 23 nt, synthetic construct
  source 1..23: mol_type = other RNA
actttattgcccaagaagaagtt

SEQ ID NO: 2831 - RNA, 23 nt, synthetic construct
  source 1..23: mol_type = other RNA
atactttattgcccaagaagatt

SEQ ID NO: 2832 - RNA, 23 nt, synthetic construct
  source 1..23: mol_type = other RNA
agtactttattgcccaagaagtt

SEQ ID NO: 2833 - RNA, 23 nt, synthetic construct
  source 1..23: mol_type = other RNA
atctagtgaaaaactgggaaatt

SEQ ID NO: 2834 - RNA, 23 nt, synthetic construct
  source 1..23: mol_type = other RNA
atcttctctagtgaaaaactgtt

SEQ ID NO: 2835 - RNA, 23 nt, synthetic construct
  source 1..23: mol_type = other RNA
aactcttctctagtgaaaaactt

SEQ ID NO: 2836 - RNA, 23 nt, synthetic construct
  source 1..23: mol_type = other RNA
aacagactcttctctagtgaatt

SEQ ID NO: 2837 - RNA, 23 nt, synthetic construct
  source 1..23: mol_type = other RNA
aagcgccgaacaacatgcgcgtt

SEQ ID NO: 2838 - RNA, 23 nt, synthetic construct
  source 1..23: mol_type = other RNA
tcgtggacttgactttagggctt

SEQ ID NO: 2839 - RNA, 23 nt, synthetic construct
  source 1..23: mol_type = other RNA
acgtagactgagcttggtgattt

SEQ ID NO: 2840 - RNA, 23 nt, synthetic construct
  source 1..23: mol_type = other RNA
aataccggagaggacgccgactt

SEQ ID NO: 2841 - RNA, 23 nt, synthetic construct
  source 1..23: mol_type = other RNA
acgggataccggagaggacgctt

SEQ ID NO: 2842 - RNA, 23 nt, synthetic construct
  source 1..23: mol_type = other RNA
tccgcacaagatctgagaggatt

SEQ ID NO: 2843 - RNA, 23 nt, synthetic construct
  source 1..23: mol_type = other RNA
ttccgcacaagatctgagaggtt

SEQ ID NO: 2844 - RNA, 23 nt, synthetic construct
  source 1..23: mol_type = other RNA
aagttgaaggatggatggaagtt

SEQ ID NO: 2845 - RNA, 23 nt, synthetic construct
  source 1..23: mol_type = other RNA
attaagttgaaggatggatggtt

SEQ ID NO: 2846 - RNA, 23 nt, synthetic construct
  source 1..23: mol_type = other RNA
attgcttaagttgaaggatggtt

SEQ ID NO: 2847 - RNA, 23 nt, synthetic construct
  source 1..23: mol_type = other RNA
acttgcttaagttgaaggatgtt

SEQ ID NO: 2848 - RNA, 23 nt, synthetic construct
  source 1..23: mol_type = other RNA
atcggaggaacttgcttaagttt

SEQ ID NO: 2849 - RNA, 23 nt, synthetic construct
  source 1..23: mol_type = other RNA
acacaggacatcgtcgggcattt

SEQ ID NO: 2850 - RNA, 23 nt, synthetic construct
  source 1..23: mol_type = other RNA
accacaggacatcgtcgggcatt

SEQ ID NO: 2851 - RNA, 23 nt, synthetic construct
  source 1..23: mol_type = other RNA
acaaccacaggacatcgtcggtt

SEQ ID NO: 2852 - RNA, 23 nt, synthetic construct
  source 1..23: mol_type = other RNA
atgcaaccacaggacatcgtctt

SEQ ID NO: 2853 - RNA, 23 nt, synthetic construct
  source 1..23: mol_type = other RNA
aggtcacccactgcaaccacatt

SEQ ID NO: 2854 - RNA, 23 nt, synthetic construct
  source 1..23: mol_type = other RNA
tgaacacctgtgaggtcaccctt

SEQ ID NO: 2855 - RNA, 23 nt, synthetic construct
  source 1..23: mol_type = other RNA
agtgaacacctgtgaggtcactt

SEQ ID NO: 2856 - RNA, 23 nt, synthetic construct
  source 1..23: mol_type = other RNA
aagtgaacacctgtgaggtcatt

SEQ ID NO: 2857 - RNA, 23 nt, synthetic construct
  source 1..23: mol_type = other RNA
tcgagtgaacacctgtgaggttt

SEQ ID NO: 2858 - RNA, 23 nt, synthetic construct
  source 1..23: mol_type = other RNA
actcgagtgaacacctgtgagtt

SEQ ID NO: 2859 - RNA, 23 nt, synthetic construct
  source 1..23: mol_type = other RNA
aactcgagtgaacacctgtgatt

SEQ ID NO: 2860 - RNA, 23 nt, synthetic construct
  source 1..23: mol_type = other RNA
acactcgagtgaacacctgtgtt

SEQ ID NO: 2861 - RNA, 23 nt, synthetic construct
  source 1..23: mol_type = other RNA
agcactcgagtgaacacctgttt

SEQ ID NO: 2862 - RNA, 23 nt, synthetic construct
  source 1..23: mol_type = other RNA
aagcactcgagtgaacacctgtt

SEQ ID NO: 2863 - RNA, 23 nt, synthetic construct
  source 1..23: mol_type = other RNA
acacatcagcactcgagtgaatt

SEQ ID NO: 2864 - RNA, 23 nt, synthetic construct
  source 1..23: mol_type = other RNA
attggctgctcactggcattttt

SEQ ID NO: 2865 - RNA, 23 nt, synthetic construct
  source 1..23: mol_type = other RNA
agtgtgcatggggaggcctgttt

SEQ ID NO: 2866 - RNA, 23 nt, synthetic construct
  source 1..23: mol_type = other RNA
agtcctgctcaggtgtgcatgtt

SEQ ID NO: 2867 - RNA, 23 nt, synthetic construct
  source 1..23: mol_type = other RNA
aggccagtcctgctcaggtgttt

SEQ ID NO: 2868 - RNA, 23 nt, synthetic construct
  source 1..23: mol_type = other RNA
atttggtctctgctggacagctt

SEQ ID NO: 2869 - RNA, 23 nt, synthetic construct
  source 1..23: mol_type = other RNA
atgctttggtctctgctggactt

SEQ ID NO: 2870 - RNA, 23 nt, synthetic construct
  source 1..23: mol_type = other RNA
aatggaccgcggggtggcctctt

SEQ ID NO: 2871 - RNA, 23 nt, synthetic construct
  source 1..23: mol_type = other RNA
atgacttcaggcctggctgggtt

SEQ ID NO: 2872 - RNA, 23 nt, synthetic construct
  source 1..23: mol_type = other RNA
aatgacttcaggcctggctggtt

SEQ ID NO: 2873 - RNA, 23 nt, synthetic construct
  source 1..23: mol_type = other RNA
acctcaggatccatcccttcttt

SEQ ID NO: 2874 - RNA, 23 nt, synthetic construct
  source 1..23: mol_type = other RNA
acgacctcaggatccatcccttt

SEQ ID NO: 2875 - RNA, 23 nt, synthetic construct
  source 1..23: mol_type = other RNA
atgggcatggcgacctcaggatt

SEQ ID NO: 2876 - RNA, 23 nt, synthetic construct
  source 1..23: mol_type = other RNA
tgcccagctgggcatggcgactt

SEQ ID NO: 2877 - RNA, 23 nt, synthetic construct
  source 1..23: mol_type = other RNA
aactcatgtttgcccagctggtt

SEQ ID NO: 2878 - RNA, 23 nt, synthetic construct
  source 1..23: mol_type = other RNA
agactcatgtttgcccagctgtt

SEQ ID NO: 2879 - RNA, 23 nt, synthetic construct
  source 1..23: mol_type = other RNA
aagactcatgtttgcccagcttt

SEQ ID NO: 2880 - RNA, 23 nt, synthetic construct
  source 1..23: mol_type = other RNA
tccagactcatgtttgcccagtt

SEQ ID NO: 2881 - RNA, 23 nt, synthetic construct
  source 1..23: mol_type = other RNA
aaatccagactcatgtttgcctt

SEQ ID NO: 2882 - RNA, 23 nt, synthetic construct
  source 1..23: mol_type = other RNA
agaatccagactcatgtttgctt

SEQ ID NO: 2883 - RNA, 23 nt, synthetic construct
  source 1..23: mol_type = other RNA
aagaatccagactcatgtttgtt

SEQ ID NO: 2884 - RNA, 23 nt, synthetic construct
  source 1..23: mol_type = other RNA
accgactccggggaagaatcctt

SEQ ID NO: 2885 - RNA, 23 nt, synthetic construct
  source 1..23: mol_type = other RNA
accaaggcagccgactccgggtt

SEQ ID NO: 2886 - RNA, 23 nt, synthetic construct
  source 1..23: mol_type = other RNA
agcgagcctgggcgagagggttt

SEQ ID NO: 2887 - RNA, 23 nt, synthetic construct
  source 1..23: mol_type = other RNA
tagcgagcctgggcgagagggtt

SEQ ID NO: 2888 - RNA, 23 nt, synthetic construct
  source 1..23: mol_type = other RNA
atgtagcgagcctgggcgagatt

SEQ ID NO: 2889 - RNA, 23 nt, synthetic construct
  source 1..23: mol_type = other RNA
atttcttcactcagtgctgtatt

SEQ ID NO: 2890 - RNA, 23 nt, synthetic construct
  source 1..23: mol_type = other RNA
aataagacattatcctaatggtt

SEQ ID NO: 2891 - RNA, 23 nt, synthetic construct
  source 1..23: mol_type = other RNA
acataagacattatcctaatgtt

SEQ ID NO: 2892 - RNA, 23 nt, synthetic construct
  source 1..23: mol_type = other RNA
aggtacgttgtcactcactcctt

SEQ ID NO: 2893 - RNA, 23 nt, synthetic construct
  source 1..23: mol_type = other RNA
agggtacgttgtcactcactctt

SEQ ID NO: 2894 - RNA, 23 nt, synthetic construct
  source 1..23: mol_type = other RNA
aggtactttattgcccaagaatt

SEQ ID NO: 2895 - RNA, 23 nt, synthetic construct
  source 1..23: mol_type = other RNA
tggacattggccgggaggcattt

SEQ ID NO: 2896 - RNA, 23 nt, synthetic construct
  source 1..23: mol_type = other RNA
atgtgcagaggcgtagactgatt

SEQ ID NO: 2897 - RNA, 23 nt, synthetic construct
  source 1..23: mol_type = other RNA
tgtcggaggaacttgcttaagtt

SEQ ID NO: 2898 - RNA, 23 nt, synthetic construct
  source 1..23: mol_type = other RNA
aacattggccgggaggcattttt

SEQ ID NO: 2899 - RNA, 23 nt, synthetic construct
  source 1..23: mol_type = other RNA
agacattggccgggaggcatttt

SEQ ID NO: 2900 - RNA, 23 nt, synthetic construct
  source 1..23: mol_type = other RNA
acaggtactttattgcccaagtt

SEQ ID NO: 2901 - RNA, 23 nt, synthetic construct
  source 1..23: mol_type = other RNA
acaacgccccggccgaagcgctt

SEQ ID NO: 2902 - RNA, 23 nt, synthetic construct
  source 1..23: mol_type = other RNA
actccggggaagaatccagactt

SEQ ID NO: 2903 - RNA, 23 nt, synthetic construct
  source 1..23: mol_type = other RNA
acccatcagacactctggtaatt

SEQ ID NO: 2904 - RNA, 23 nt, synthetic construct
  source 1..23: mol_type = other RNA
atgaggtcacccactgcaacctt

SEQ ID NO: 2905 - RNA, 23 nt, synthetic construct
  source 1..23: mol_type = other RNA
agaaagtcagacaccagaacgtt

SEQ ID NO: 2906 - RNA, 23 nt, synthetic construct
  source 1..23: mol_type = other RNA
tctagcagctcatctccctcctt

SEQ ID NO: 2907 - RNA, 23 nt, synthetic construct
  source 1..23: mol_type = other RNA
tgtccacatgaagaaagttcgtt

SEQ ID NO: 2908 - RNA, 23 nt, synthetic construct
  source 1..23: mol_type = other RNA
agctgctcactggcatttgggtt

SEQ ID NO: 2909 - RNA, 23 nt, synthetic construct
  source 1..23: mol_type = other RNA
agagagaaggtagaggttccctt

SEQ ID NO: 2910 - RNA, 23 nt, synthetic construct
  source 1..23: mol_type = other RNA
tccacatgaagaaagttcgtgtt

SEQ ID NO: 2911 - RNA, 23 nt, synthetic construct
  source 1..23: mol_type = other RNA
tccacctttgtctttcatttctt

SEQ ID NO: 2912 - RNA, 23 nt, synthetic construct
  source 1..23: mol_type = other RNA
ttccacaggcagggtacagggtt

SEQ ID NO: 2913 - RNA, 23 nt, synthetic construct
  source 1..23: mol_type = other RNA
atccacctttgtctttcattttt

SEQ ID NO: 2914 - RNA, 23 nt, synthetic construct
  source 1..23: mol_type = other RNA
aagcagacacatcagcactcgtt

SEQ ID NO: 2915 - RNA, 23 nt, synthetic construct
  source 1..23: mol_type = other RNA
accgcgctctgcgtcgtacattt

SEQ ID NO: 2916 - RNA, 23 nt, synthetic construct
  source 1..23: mol_type = other RNA
aacttgcttaagttgaaggattt

SEQ ID NO: 2917 - RNA, 23 nt, synthetic construct
  source 1..23: mol_type = other RNA
aaacttgcttaagttgaaggatt

SEQ ID NO: 2918 - RNA, 23 nt, synthetic construct
  source 1..23: mol_type = other RNA
aattggccgggaggcatttgctt

SEQ ID NO: 2919 - RNA, 23 nt, synthetic construct
  source 1..23: mol_type = other RNA
tgcaaccacaggacatcgtcgtt

SEQ ID NO: 2920 - RNA, 23 nt, synthetic construct
  source 1..23: mol_type = other RNA
agccgaagcgccgaacaacattt

SEQ ID NO: 2921 - RNA, 23 nt, synthetic construct
  source 1..23: mol_type = other RNA
acccggccgaagcgccgaacatt

SEQ ID NO: 2922 - RNA, 23 nt, synthetic construct
  source 1..23: mol_type = other RNA
accaaggcatccacgacttcgtt

SEQ ID NO: 2923 - RNA, 23 nt, synthetic construct
  source 1..23: mol_type = other RNA
aagaaagttcgtggacttgactt

SEQ ID NO: 2924 - RNA, 23 nt, synthetic construct
  source 1..23: mol_type = other RNA
aaagaaagttcgtggacttgatt

SEQ ID NO: 2925 - RNA, 23 nt, synthetic construct
  source 1..23: mol_type = other RNA
tcgagagaaggtagaggttcctt

SEQ ID NO: 2926 - RNA, 23 nt, synthetic construct
  source 1..23: mol_type = other RNA
agggacaaaagctctcgagagtt

SEQ ID NO: 2927 - RNA, 23 nt, synthetic construct
  source 1..23: mol_type = other RNA
agataccggagaggacgccgatt

SEQ ID NO: 2928 - RNA, 23 nt, synthetic construct
  source 1..23: mol_type = other RNA
aggataccggagaggacgccgtt

SEQ ID NO: 2929 - RNA, 23 nt, synthetic construct
  source 1..23: mol_type = other RNA
tgctccagcgggataccggagtt

SEQ ID NO: 2930 - RNA, 23 nt, synthetic construct
  source 1..23: mol_type = other RNA
tggccttccgcacaagatctgtt

SEQ ID NO: 2931 - RNA, 23 nt, synthetic construct
  source 1..23: mol_type = other RNA
ttgcttaagttgaaggatggatt

SEQ ID NO: 2932 - RNA, 23 nt, synthetic construct
  source 1..23: mol_type = other RNA
tctgctttggtctctgctggatt

SEQ ID NO: 2933 - RNA, 23 nt, synthetic construct
  source 1..23: mol_type = other RNA
tcaggatccatcccttctgagtt

SEQ ID NO: 2934 - RNA, 23 nt, synthetic construct
  source 1..23: mol_type = other RNA
aagctgggcatggcgacctcatt

SEQ ID NO: 2935 - RNA, 23 nt, synthetic construct
  source 1..23: mol_type = other RNA
atttgcccagctgggcatggctt

SEQ ID NO: 2936 - RNA, 23 nt, synthetic construct
  source 1..23: mol_type = other RNA
tacataagacattatcctaattt

SEQ ID NO: 2937 - RNA, 23 nt, synthetic construct
  source 1..23: mol_type = other RNA
acattacataagacattatcctt

SEQ ID NO: 2938 - RNA, 23 nt, synthetic construct
  source 1..23: mol_type = other RNA
tacagggcagcattacataagtt

SEQ ID NO: 2939 - RNA, 23 nt, synthetic construct
  source 1..23: mol_type = other RNA
aattccacaggcagggtacagtt

SEQ ID NO: 2940 - RNA, 23 nt, synthetic construct
  source 1..23: mol_type = other RNA
aatcgcaatggcagattccactt

SEQ ID NO: 2941 - RNA, 23 nt, synthetic construct
  source 1..23: mol_type = other RNA
tggtctctgctggacagcccttt

SEQ ID NO: 2942 - RNA, 23 nt, synthetic construct
  source 1..23: mol_type = other RNA
atcaggtgtgcatggggaggctt

SEQ ID NO: 2943 - RNA, 23 nt, synthetic construct
  source 1..23: mol_type = other RNA
aactccggggaagaatccagatt

SEQ ID NO: 2944 - RNA, 23 nt, synthetic construct
  source 1..23: mol_type = other RNA
atgaacacctgtgaggtcacctt

SEQ ID NO: 2945 - RNA, 23 nt, synthetic construct
  source 1..23: mol_type = other RNA
aacacctgtgaggtcacccactt

SEQ ID NO: 2946 - RNA, 23 nt, synthetic construct
  source 1..23: mol_type = other RNA
acttaagttgaaggatggatgtt

SEQ ID NO: 2947 - RNA, 23 nt, synthetic construct
  source 1..23: mol_type = other RNA
acgcacaagatctgagaggactt

SEQ ID NO: 2948 - RNA, 23 nt, synthetic construct
  source 1..23: mol_type = other RNA
agcgggataccggagaggacgtt

SEQ ID NO: 2949 - RNA, 23 nt, synthetic construct
  source 1..23: mol_type = other RNA
agggataccggagaggacgcctt

SEQ ID NO: 2950 - RNA, 23 nt, synthetic construct
  source 1..23: mol_type = other RNA
ataccggagaggacgccgacgtt

SEQ ID NO: 2951 - RNA, 23 nt, synthetic construct
  source 1..23: mol_type = other RNA
agaacataccaaggcatccactt

SEQ ID NO: 2952 - RNA, 23 nt, synthetic construct
  source 1..23: mol_type = other RNA
aacataccaaggcatccacgatt

SEQ ID NO: 2953 - RNA, 23 nt, synthetic construct
  source 1..23: mol_type = other RNA
taccggagaggacgccgacgctt

SEQ ID NO: 2954 - RNA, 23 nt, synthetic construct
  source 1..23: mol_type = other RNA
aggccgaagcgccgaacaacatt

SEQ ID NO: 2955 - RNA, 23 nt, synthetic construct
  source 1..23: mol_type = other RNA
aagaccctgtcggaggaactttt

SEQ ID NO: 2956 - RNA, 23 nt, synthetic construct
  source 1..23: mol_type = other RNA
acgaagcgccgaacaacatgctt

SEQ ID NO: 2957 - RNA, 23 nt, synthetic construct
  source 1..23: mol_type = other RNA
tcggaggaacttgcttaagtttt

SEQ ID NO: 2958 - RNA, 23 nt, synthetic construct
  source 1..23: mol_type = other RNA
acagccgcgctctgcgtcgtatt

SEQ ID NO: 2959-3588 - skipped (630 entries)

SEQ ID NO: 3589 - DNA, 22 bp, synthetic construct
  source 1..22: mol_type = other DNA
ctatgtgcaggagagaaccatc

SEQ ID NO: 3590 - DNA, 21 bp, synthetic construct
  source 1..21: mol_type = other DNA
gcccttcagctcgattctatt

SEQ ID NO: 3591 - DNA, 24 bp, synthetic construct
  source 1..24: mol_type = other DNA
tacaagacccgcgctgaagtcaag

SEQ ID NO: 3592 - DNA, 20 bp, synthetic construct
  source 1..20: mol_type = other DNA
tcatctgcaccactggaaag

SEQ ID NO: 3593 - DNA, 23 bp, synthetic construct
  source 1..23: mol_type = other DNA
ctgcttcatatggtctgggtatc

SEQ ID NO: 3594 - DNA, 24 bp, synthetic construct
  source 1..24: mol_type = other DNA
ccaacactggtcactaccctcacc

SEQ ID NO: 3595 - DNA, 16 bp, synthetic construct
  source 1..16: mol_type = other DNA
gccagccatctgttgt

SEQ ID NO: 3596 - DNA, 16 bp, synthetic construct
  source 1..16: mol_type = other DNA
ggagtggcaccttcca

SEQ ID NO: 3597 - DNA, 21 bp, synthetic construct
  source 1..21: mol_type = other DNA
tcccccgtgccttccttgacc

SEQ ID NO: 3598 - protein, 13 aa, synthetic construct
VSDGENVLVSDFR

SEQ ID NO: 3599 - protein, 14 aa, synthetic construct
LISWYDNEYGYSNR

1. An RNAi construct comprising a sense strand and an antisense strand, wherein the antisense strand comprises a region that is complementary to a Patatin-Like Phospholipase Domain Containing 3 (PNPLA3) mRNA sequence comprising any one of SEQ ID NOs: 1-60, and wherein the RNAi construct inhibits the expression of PNPLA3.

2. The RNAi construct of claim 1, which comprises a region having at least 15 contiguous nucleotides differing by no more than 3 nucleotides from an antisense sequence selected from SEQ ID NOs: 565-1068 and SEQ ID NOs: 2329-3588.

3. The RNAi construct of claim 1, wherein the antisense strand hybridizes to a PNPLA3 mRNA sequence comprising any one of SEQ ID NOs: 1-60.

4. The RNAi construct of claim 1, wherein the sense strand comprises a sequence that is sufficiently complementary to the sequence of the antisense strand to form a duplex region of about 15 to about 30 base pairs in length.

5. The RNAi construct of claim 4, wherein the duplex region is about 17 to about 24 base pairs in length.

6. The RNAi construct of claim 4, wherein the duplex region is about 19 to about 21 base pairs in length.

7.-9. (canceled)

10. The RNAi construct of claim 4, wherein the sense strand and the antisense strand are each about 15 to about 30 nucleotides in length.

11. (canceled)

12. The RNAi construct of claim 10, wherein the sense strand and the antisense strand are each about 20 to about 25 nucleotides in length.

13. (canceled)

14. The RNAi construct of claim 1, which comprises at least one blunt end.

15. The RNAi construct of claim 1, which comprises at least one nucleotide overhang of 1 to 4 unpaired nucleotides.

16. The RNAi construct of claim 15, wherein the nucleotide overhang has two unpaired nucleotides.

17. The RNAi construct of claim 15, wherein the RNAi construct comprises a nucleotide overhang at the 3′ end of the sense strand, the 3′ end of the antisense strand, or the 3′ end of both the sense strand and the antisense strand.

18. The RNAi construct of claim 15, wherein the nucleotide overhang comprises a 5′-UU-3′ dinucleotide or a 5′-dTdT-3′ dinucleotide.

19. The RNAi construct of claim 1, wherein the RNAi construct comprises at least one modified nucleotide.

20. The RNAi construct of claim 19, wherein the modified nucleotide is a 2′-modified nucleotide.

21. The RNAi construct of claim 19, wherein the modified nucleotide is a 2′-fluoro modified nucleotide, a 2′-O-methyl modified nucleotide, a 2′-O-methoxyethyl modified nucleotide, a 2′-O-allyl modified nucleotide, a bicyclic nucleic acid (BNA), a glycol nucleic acid, an inverted base, or combinations thereof.

22. The RNAi construct of claim 21, wherein the modified nucleotide is a 2′-O-methyl modified nucleotide, a 2′-O-methoxyethyl modified nucleotide, a 2′-fluoro modified nucleotide, or combinations thereof.

23. The RNAi construct of claim 19, wherein all of the nucleotides in the sense and antisense strands are modified nucleotides.

24. The RNAi construct of claim 23, wherein the modified nucleotides are 2′-O-methyl modified nucleotides, 2′-fluoro modified nucleotides, or combinations thereof.

25. The RNAi construct of claim 1, which comprises at least one phosphorothioate internucleotide linkage.

26. The RNAi construct of claim 25, wherein the RNAi construct comprises two consecutive phosphorothioate internucleotide linkages at the 3′ end of the antisense strand.

27. The RNAi construct of claim 25, wherein the RNAi construct comprises two consecutive phosphorothioate internucleotide linkages at both the 3′ and 5′ ends of the antisense strand and two consecutive phosphorothioate internucleotide linkages at the 5′ end of the sense strand.

28. The RNAi construct of claim 1, wherein the antisense strand comprises a sequence selected from SEQ ID NOs: 565-1068 and SEQ ID NOs: 2329-3588.

29. The RNAi construct of claim 28, wherein the sense strand comprises a sequence selected from SEQ ID NOs: 61-564 and SEQ ID NOs: 1069-2328.

30. The RNAi construct of claim 1, wherein the RNAi construct is a duplex compound comprising an antisense strand and a sense strand, wherein the antisense strand comprises a sequence selected from SEQ ID NOs: 565-1068 and SEQ ID NOs: 2329-3588 and the sense strand comprises a sequence selected from SEQ ID NOs: 61-564 and SEQ ID NOs: 1069-2328.

31. The RNAi construct of claim 30, which comprises:
a. an antisense strand comprising SEQ ID NO: 594 and a sense strand comprising SEQ ID NO: 90;
b. an antisense strand comprising SEQ ID NO: 846 and a sense strand comprising SEQ ID NO: 342;
c. an antisense strand comprising SEQ ID NO: 655 and a sense strand comprising SEQ ID NO: 151;
d. an antisense strand comprising SEQ ID NO: 907 and a sense strand comprising SEQ ID NO: 403;
e. an antisense strand comprising SEQ ID NO: 757 and a sense strand comprising SEQ ID NO: 253;
f. an antisense strand comprising SEQ ID NO: 1009 and a sense strand comprising SEQ ID NO: 505;
g. an antisense strand comprising SEQ ID NO: 767 and a sense strand comprising SEQ ID NO: 263; or
h. an antisense strand comprising SEQ ID NO: 1019 and a sense strand comprising SEQ ID NO: 515.

32. The RNAi construct of claim 1, wherein the RNAi construct reduces the expression level of PNPLA3 in liver cells following incubation with the RNAi construct as compared to the PNPLA3 expression level in liver cells that have been incubated with a control RNAi construct.

33. The RNAi construct of claim 32, wherein the liver cells are Hep3B or HepG2 cells.

34.-37. (canceled)

38. The RNAi construct of claim 1, further comprising a ligand that binds to one or more proteins expressed on the surface of liver cells.

39. A composition comprising the RNAi construct of claim 1 and a pharmaceutically acceptable carrier, excipient, or diluent.

40. A method for reducing the expression of PNPLA3 in a patient in need thereof comprising administering to the patient the RNAi construct of claim 1.

41. A method for reducing the expression of PNPLA3 in a patient in need thereof comprising administering to the patient the composition of claim 39.

42. The method of claim 40, wherein the expression level of PNPLA3 in hepatocytes is reduced in the patient following administration of the RNAi construct as compared to the PNPLA3 expression level in a patient not receiving the RNAi construct.

43. The method of claim 40, wherein the patient suffers from nonalcoholic fatty liver disease (NAFLD).

44. The method of claim 43, wherein the patient suffers from non-alcoholic steatohepatitis (NASH).

45. (canceled)
